United States Patent Application Publication US 2026/0337586 A1, published October 29, 2026 (application 19/111,260).

The application's sequence listing, which the Patent Office published only in electronic form, follows.

SEQUENCE LISTING (540 sequences)

SEQ ID NO: 1 - DNA, 1812 bp, synthetic construct
  misc_feature 1..1812: note = Variant of DNA polymerase
  source 1..1812: mol_type = other DNA
atgcatcaccatcaccatcacggtggcagcggtatggttgcaccacagaccaaaaaagaagaagccgtactgccgaacatcaattatacaattgtggaggaagtcagcgaaccgattctcgcggatcgttcggcgttagtggttgaggttctggaatccaactaccataaggctccgatcctgggctttgccctggccaatgaacacggtaacttcttcattcgcactgacacggctctttcttctccgctgtttaccgcgtggctggaggatgagagcaagaagaaatcagtattcgacggaaaacgcgcaatcgtggccctgaaatggaaaggcattgaattacgtggcatcgaatttgacttgttgatcgcttcatatctcctgaatccctcgcaaagcacggaagatgtcgcaagcgtggccaagaccaaacagtacatggcagtacagagtgatgaagcagtctatggaaaaggtgcgaaacaaacggtgccagatgaaaacgttttagccgaacatctggtgcgtaaagctgctgcaattcgcgccctggagaaagaactgatccacgatttgcaggaaaatgaacaatacgccctgtttactgaccttgaattacctctgtcctcgattctggcagagatggaatttaccggtgtgaaagtagatgttgaacgcctgaaagaaatgggcgaggagctcacagaacaactgcgcgcagtggagcaggaaatctataagttagctggccaagaattcaacattaacagccctaaacaactgggtgtcattctgtttgaaaaattacagcttcccgtcctgaagaagacgaagaccggctatagtacgagtgctgatgtgctcgagaaacttgccccgcagcatgaaatcgtcgagaaaattcttcactaccgtcagctcggtaaactgcaatccacatatattgaagggctgctgaaagttgtacatcgcgacacccataaagtccacaccatcttcaaccaggccctgactcaaaccgggcgcctgtcaagcaccgaacctaatctccagaacatcccaattcgtctggaagaaggccgcaaaattcgccaagcatttgtgccatcgaaacctgactgggttatctttagcgcagattactcacagattgagctccgtgttctcgcacacattgcaaacgatgaaaatctgatcgatgcttttcgtcatgaccttgacatccatacgaagacagccatggatattttccatgtaacagcagatgaagttacccccaatatgcgtcgccaagcaaaagccgtgaacttcggtattgtctatgggatctctgattacggtctgagtcagaaccttaatatcccacgcaaagaagccgccgaatttattcgtcgttatttcgaaatttttcccggcgttaaacagtacatggagaatattgtacaggaagccaaacagaaaggatacgtcaccacccttttacaccgccgccgctatctgccagacatcacctctcgtaatttcaacttacgttcattcgcagaacgcacggccatgaacaccccaattcaaggatcagccgccgacatcatcaagaaggcaatgattgatttagctgatcgtctgaaacgcgagaaacttcaagctcgtatgctgctccaggttcatgacgaactgattcttgaagctcctcgtgaggaagtcgaacgcctgcagcagattgtacccgaggtcatggagaacgccatccagttaaccgtcccactgaaagttgattatcactacggtcctacgtggtacgacgctaag

SEQ ID NO: 2 - protein, 604 aa, synthetic construct
  REGION 1..604: note = Variant of DNA polymerase
MHHHHHHGGSGMVAPQTKKEEAVLPNINYTIVEEVSEPILADRSALVVEVLESNYHKAPILGFALANEHGNFFIRTDTALSSPLFTAWLEDESKKKSVFDGKRAIVALKWKGIELRGIEFDLLIASYLLNPSQSTEDVASVAKTKQYMAVQSDEAVYGKGAKQTVPDENVLAEHLVRKAAAIRALEKELIHDLQENEQYALFTDLELPLSSILAEMEFTGVKVDVERLKEMGEELTEQLRAVEQEIYKLAGQEFNINSPKQLGVILFEKLQLPVLKKTKTGYSTSADVLEKLAPQHEIVEKILHYRQLGKLQSTYIEGLLKVVHRDTHKVHTIFNQALTQTGRLSSTEPNLQNIPIRLEEGRKIRQAFVPSKPDWVIFSADYSQIELRVLAHIANDENLIDAFRHDLDIHTKTAMDIFHVTADEVTPNMRRQAKAVNFGIVYGISDYGLSQNLNIPRKEAAEFIRRYFEIFPGVKQYMENIVQEAKQKGYVTTLLHRRRYLPDITSRNFNLRSFAERTAMNTPIQGSAADIIKKAMIDLADRLKREKLQARMLLQVHDELILEAPREEVERLQQIVPEVMENAIQLTVPLKVDYHYGPTWYDAK

SEQ ID NO: 3 - DNA, 1812 bp, synthetic construct
  misc_feature 1..1812: note = Variant of DNA polymerase
  source 1..1812: mol_type = other DNA
atgcatcaccatcaccatcacggtggcagcggtatggttgcaccacagaccaaaaaagaagaagccgtactgccgaacatcaattatacaattgtggaggaagtcagcgaaccgattctcgcggatcgttcggcgttagtggttgaggttctggaatccaactaccataaggctccgatcctgggctttgccctggccaatgaacacggtaacttcttcattcgcactgacacggctctttcttctccgctgtttaccgcgtggctggaggatgagagcaagaagaaatcagtattcgacggaaaacgcgcaatcgtggccctgaaatggaaaggcattgaattacgtggcatcgaatttgacttgttgatcgcttcatatctcctgaatccctcgcaaagcacggaagatgtcgcaagcgtggccaagaccaaacagtacatggcagtacagagtgatgaagcagtctatggaaaaggtgcgaaacaaacggtgccagatgaaaacgttttagccgaacatctggtgcgtaaagctgctgcaattcgcgccctggagaaagaactgatccacgatttgcaggaaaatgaacaatacgccctgtttactgaccttgaattacctctgtcctcgattctggcagagatggaatttaccggtgtgaaagtagatgttgaacgcctgaaagaaatgggcgaggagctcacagaacaactgcgcgcagtggagcaggaaatctataagttagctggccaagaattcaacattaacagccctaaacaactgggtgtcattctgtttgaaaaattacagcttcccgtcctgaagaagacgaagaccggctatagtacgagtgctgatgtgctcgagaaacttgccccgcagcatgaaatcgtcgagaaaattcttcactaccgtcagctcggtaaactgcaatccacatatattgaagggctgctgaaagttgtacatcgcgacacccataaagtccacaccatcttcaaccaggccctgactcaaaccgggcgcctgtcaagcaccgaacctaatctccagaacatcccaattcgtctggaagaaggccgcaaaattcgccaagcatttgtgccatcgaaacctgactgggttatctttagcgcagattactcacagattgagctccgtgttctcgcacacattgcaaacgatgaaaatctgatcgatgcttttcgtcatgaccttgacatccatacgaagacagccatggatattttccatgtaacagcagatgaagttacccccaatatgcgtcgccaagcaaaagccgtgaacttcggtattgtctatgggatctctgattacggtctgagtcagaaccttaatatcccacgcaaagaagccgccgaatttattcgtcgttatttcgaaatttttcccggcgttaaacagtacatggagaatattgtacaggaagccaaacagaaaggatacgtcaccacccttttacaccgccgccgctatctgccagacatcacctctcgtaatcggaacttacgttcattcgcagaacgcacggccatgaacaccccaattcaaggatcagccgccgacatcatcaagaaggcaatgattgatttagctgatcgtctgaaacgcgagaaacttcaagctcgtatgctgctccaggttcatgacgaactgattcttgaagctcctcgtgaggaagtcgaacgcctgcagcagattgtacccgaggtcatggagaacgccatccagttaaccgtcccactgaaagttgattatcactacggtcctacgtggtacgacgctaag

SEQ ID NO: 4 - protein, 604 aa, synthetic construct
  REGION 1..604: note = Variant of DNA polymerase
MHHHHHHGGSGMVAPQTKKEEAVLPNINYTIVEEVSEPILADRSALVVEVLESNYHKAPILGFALANEHGNFFIRTDTALSSPLFTAWLEDESKKKSVFDGKRAIVALKWKGIELRGIEFDLLIASYLLNPSQSTEDVASVAKTKQYMAVQSDEAVYGKGAKQTVPDENVLAEHLVRKAAAIRALEKELIHDLQENEQYALFTDLELPLSSILAEMEFTGVKVDVERLKEMGEELTEQLRAVEQEIYKLAGQEFNINSPKQLGVILFEKLQLPVLKKTKTGYSTSADVLEKLAPQHEIVEKILHYRQLGKLQSTYIEGLLKVVHRDTHKVHTIFNQALTQTGRLSSTEPNLQNIPIRLEEGRKIRQAFVPSKPDWVIFSADYSQIELRVLAHIANDENLIDAFRHDLDIHTKTAMDIFHVTADEVTPNMRRQAKAVNFGIVYGISDYGLSQNLNIPRKEAAEFIRRYFEIFPGVKQYMENIVQEAKQKGYVTTLLHRRRYLPDITSRNRNLRSFAERTAMNTPIQGSAADIIKKAMIDLADRLKREKLQARMLLQVHDELILEAPREEVERLQQIVPEVMENAIQLTVPLKVDYHYGPTWYDAK

SEQ ID NO: 5 - DNA, 1812 bp, synthetic construct
  misc_feature 1..1812: note = Variant of DNA polymerase
  source 1..1812: mol_type = other DNA
atgcatcaccatcaccatcacggtggcagcggtatggttgcaccacagaccaaaaaagaagaagccgtactgccgaacatcaattatacaattgtggaggaagtcagcgaaccgattctcgcggatcgttcggcgttagtggttgaggttctggaatccaactaccataaggctccgatcctgggctttgccctggccaatgaacacggtaacttcttcattcgcactgacacggctctttcttctccgctgtttaccgcgtggctggaggatgagagcaagaagaaatcagtattcgacggaaaacgcgcaatcgtggccctgaaatggaaaggcattgaattacgtggcatcgaatttgacttgttgatcgcttcatatctcctgaatccctcgcaaagcacggaagatgtcgcaagcgtggccaagaccaaacagtacatggcagtacagagtgatgaagcagtctatggaaaaggtgcgaaacaaacggtgccagatgaaaacgttttagccgaacatctggtgcgtaaagctgctgcaattcgcgccctggagaaagaactgatccacgatttgcaggaaaatgaacaatacgccctgtttactgaccttgaattacctctgtcctcgattctggcagagatggaatttaccggtgtgaaagtagatgttgaacgcctgaaagaaatgggcgaggagctcacagaacaactgcgcgcagtggagcaggaaatctataagttagctggccaagaattcaacattaacagccctaaacaactgggtgtcattctgtttgaaaaattacagcttcccgtcctgaagaagacgaagaccggctatagtacgagtgctgatgtgctcgagaaacttgccccgcagcatgaaatcgtcaggaaaattcttcactaccgtcagctcggtaaactgcaatccacatatattgaagggctgctgaaagttgtacatcgcgacacccataaagtccacaccatcttcaaccaggccctgactcaaaccgggcgcctgtcaagcaccgaacctaatctccagaacatcccaattcgtctggaagaaggccgcaaaattcgccaagcatttgtgccatcgaaacctgactgggttatctttagcgcagattactcacagattgagctccgtgttctcgcacacattgcaaacgatgaaaatctgatcgatgcttttcgtcatgaccttgacatccatacgaagacagccatggatattttccatgtaacagcagatgaagttacccccaatatgcgtcgccaagcaaaagccgtgaacttcggtattgtctatgggatctctgattacggtctgagtcagaaccttaatatcccacgcaaagaagccgccgaatttattcgtcgttatttcgaaatttttcccggcgttaaacagtacatggagaatattgtacaggaagccaaacagaaaggatacgtcaccacccttttacaccgccgccgctatctgccagacatcacctctcgtaatttcaacttacgttcattcgcagaacgcacggccatgaacaccccaattcaaggatcagccgccgacatcatcaagaaggcaatgattgatttagctgatcgtctgaaacgcgagaaacttcaagctcgtatgctgctccaggttcatgacgaactgattcttgaagctcctcgtgaggaagtcgaacgcctgcagcagattgtacccgaggtcatggagaacgccatccagttaaccgtcccactgaaagttgattatcactacggtcctacgtggtacgacgctaag

SEQ ID NO: 6 - protein, 604 aa, synthetic construct
  REGION 1..604: note = Variant of DNA polymerase
MHHHHHHGGSGMVAPQTKKEEAVLPNINYTIVEEVSEPILADRSALVVEVLESNYHKAPILGFALANEHGNFFIRTDTALSSPLFTAWLEDESKKKSVFDGKRAIVALKWKGIELRGIEFDLLIASYLLNPSQSTEDVASVAKTKQYMAVQSDEAVYGKGAKQTVPDENVLAEHLVRKAAAIRALEKELIHDLQENEQYALFTDLELPLSSILAEMEFTGVKVDVERLKEMGEELTEQLRAVEQEIYKLAGQEFNINSPKQLGVILFEKLQLPVLKKTKTGYSTSADVLEKLAPQHEIVRKILHYRQLGKLQSTYIEGLLKVVHRDTHKVHTIFNQALTQTGRLSSTEPNLQNIPIRLEEGRKIRQAFVPSKPDWVIFSADYSQIELRVLAHIANDENLIDAFRHDLDIHTKTAMDIFHVTADEVTPNMRRQAKAVNFGIVYGISDYGLSQNLNIPRKEAAEFIRRYFEIFPGVKQYMENIVQEAKQKGYVTTLLHRRRYLPDITSRNFNLRSFAERTAMNTPIQGSAADIIKKAMIDLADRLKREKLQARMLLQVHDELILEAPREEVERLQQIVPEVMENAIQLTVPLKVDYHYGPTWYDAK

SEQ ID NO: 7 - DNA, 1812 bp, synthetic construct
  misc_feature 1..1812: note = Variant of DNA polymerase
  source 1..1812: mol_type = other DNA
atgcatcaccatcaccatcacggtggcagcggtatggttgcaccacagaccaaaaaagaagaagccgtactgccgaacatcaattatacaattgtggaggaagtcagcgaaccgattctcgcggatcgttcggcgttagtggttgaggttctggaatccaactaccataaggctccgatcctgggctttgccctggccaatgaacacggtaacttcttcattcgcactgacacggctctttcttctccgctgtttaccgcgtggctggaggatgagagcaagaagaaatcagtattcgacggaaaacgcgcaatcgtggccctgaaatggaaaggcattgaattacgtggcatcgaatttgacttgttgatcgcttcatatctcctgaatccctcgcaaagcacggaagatgtcgcaagcgtggccaagaccaaacagtacatggcagtacagagtgatgaagcagtctatggaaaaggtgcgaaacaaacggtgccagatgaaaacgttttagccgaacatctggtgcgtaaagctgctgcaattcgcgccctggagaaagaactgatccacgatttgcaggaaaatgaacaatacgccctgtttactgaccttgaattacctctgtcctcgattctggcagagatggaatttaccggtgtgaaagtagatgttgaacgcctgaaagaaatgggcgaggagctcacagaacaactgcgcgcagtggagcaggaaatctataagttagctggccaagaattcaacattaacagccctaaacaactgggtgtcattctgtttgaaaaattacagcttcccgtcctgaagaagacgaagaccggctatagtacgagtgctgatgtgctcgagaaacttgccccgcagcatgaaatcgtcgagaaaattcttcactaccgtcagctcggtaaactgcaatccacatatattgaagggctgctgaaagttgtacatcgcgacacccataaagtccacaccatcttcaaccaggccctgactcaaaccgggcgcctgtcaagcaccgaacctaatctccagaacatcccaattcgtctggaagaaggccgcaaaattcgccaagcatttgtgccatcgaaacctgactgggttatctttagcgcagattactcacagattgagctccgtgttctcgcacacattgcaaacgatgaaaatctgatcgatgcttttcgtcatgaccttgacatccatacgaagacagccatggatattttccatgtaacagcagatgaagttacccccaatatgcgtcgccaagcaaaagccgtgaacttcggtattgtctatgggatctctgattacggtctgagtcagcggcttaatatcccacgcaaagaagccgccgaatttattcgtcgttatttcgaaatttttcccggcgttaaacagtacatggagaatattgtacaggaagccaaacagaaaggatacgtcaccacccttttacaccgccgccgctatctgccagacatcacctctcgtaatttcaacttacgttcattcgcagaacgcacggccatgaacaccccaattcaaggatcagccgccgacatcatcaagaaggcaatgattgatttagctgatcgtctgaaacgcgagaaacttcaagctcgtatgctgctccaggttcatgacgaactgattcttgaagctcctcgtgaggaagtcgaacgcctgcagcagattgtacccgaggtcatggagaacgccatccagttaaccgtcccactgaaagttgattatcactacggtcctacgtggtacgacgctaag

SEQ ID NO: 8 - protein, 604 aa, synthetic construct
  REGION 1..604: note = Variant of DNA polymerase
MHHHHHHGGSGMVAPQTKKEEAVLPNINYTIVEEVSEPILADRSALVVEVLESNYHKAPILGFALANEHGNFFIRTDTALSSPLFTAWLEDESKKKSVFDGKRAIVALKWKGIELRGIEFDLLIASYLLNPSQSTEDVASVAKTKQYMAVQSDEAVYGKGAKQTVPDENVLAEHLVRKAAAIRALEKELIHDLQENEQYALFTDLELPLSSILAEMEFTGVKVDVERLKEMGEELTEQLRAVEQEIYKLAGQEFNINSPKQLGVILFEKLQLPVLKKTKTGYSTSADVLEKLAPQHEIVEKILHYRQLGKLQSTYIEGLLKVVHRDTHKVHTIFNQALTQTGRLSSTEPNLQNIPIRLEEGRKIRQAFVPSKPDWVIFSADYSQIELRVLAHIANDENLIDAFRHDLDIHTKTAMDIFHVTADEVTPNMRRQAKAVNFGIVYGISDYGLSQRLNIPRKEAAEFIRRYFEIFPGVKQYMENIVQEAKQKGYVTTLLHRRRYLPDITSRNFNLRSFAERTAMNTPIQGSAADIIKKAMIDLADRLKREKLQARMLLQVHDELILEAPREEVERLQQIVPEVMENAIQLTVPLKVDYHYGPTWYDAK

SEQ ID NO: 9 - DNA, 1812 bp, synthetic construct
  misc_feature 1..1812: note = Variant of DNA polymerase
  source 1..1812: mol_type = other DNA
atgcatcaccatcaccatcacggtggcagcggtatggttgcaccacagaccaaaaaagaagaagccgtactgccgaacatcaattatacaattgtggaggaagtcaccgaaccgattctcgcggatcgttcggcgttagtggttgaggttctggaatccaactaccataaggctccgatcctgggctttgccctggccaatgaacacggtaacttcttcattcgcactgacacggctctttcttctccgctgtttaccgcgtggctggaggatgagagcaagaagaaatcagtattcgacggtaaacgcgcaatcgtggccctgaaatggaaaggcattgaattacgtggcatcgaatttgacttgttgatcgcttcatatctcctgaatccctcgcaaagcacggaagatgtcgcaagcgtggccaagaccaaacagtacatggcagtacagagtgatgaagcagtctatggaaaaggtgcgaaacaaacggtgccagatgaaaacgttttagccgaacatctggtgcgtaaagctgctgcaattcgcgccctggagaaagaactgatccacgatttgcaggaaaatgaacaatacgccctgtttactgaccttgaattacctctgtcctcgattctggcagagatggaatttaccggtgtgaaagtagatgttgaacgcctgaaagaaatgggcgaggagctcacagaacaactgcgccaagtggagcaggaaatctataagttagctggccaagaattcaacattaacagccctaaacaactgggtgtcattctgtttgaaaaattacagcttcccgtcctgaagaagacgaagaccggctatagtacgagtgctgatgtgctcgagaaacttgccccgcagcatgaaatcgtcgagaaaattcttcactaccgtcagctcggtaaactgcaatccacatatattgaagggctgctgaaagttgtacatcgcgacacccataaagtccacaccatcttcaaccaggccctgactcaaaccgggcgcctgtcaagcaccgaacctaatctccagaacatcccaattcgtctggaagaaggccgcaaaattcgccaagcatttgtgccatcggaacctgactgggttatctttagcgcagattactcacagattgagctccgtgttctcgcacacattgcaaacgatgaaaatctgatcgatgcttttcgtcatgaccttgacatccatacgaagacagccatggatattttccatgtaacagcagatgaagttacccccaatatgcgtcgccaagcaaaagccgtgaacttcggtattgtctatgggatctctgattacggtctgagtcagaaccttaatatcccacgcaaagaagccgccgaatttattcgtcgttatttcgaaagctttcccggcgttaaacagtacatggagaatattgtacaggaagccaaacagaaaggatacgtcaccacccttttacaccgccgccgctatctgccagacatcacctctcgtaatttcaacttacgttcattcgcagaacgcacggccatgaacaccccaattcaaggatcagccgccgacatcatcaagaaggcaatgattgatttagctgatcgtctgaaacgcgagaaacttcaagctcgtatgctgctccaggttcatgacgaactgattcttgaagctcctcgtgaggaagtcgaacgcctgcagcagattgtacccgaggtcatggagaacgccatccagttaaccgtcccactgaaagttgattatcactacggtcctacgtggtacgacgctaag

SEQ ID NO: 10 - protein, 604 aa, synthetic construct
  REGION 1..604: note = Variant of DNA polymerase
MHHHHHHGGSGMVAPQTKKEEAVLPNINYTIVEEVTEPILADRSALVVEVLESNYHKAPILGFALANEHGNFFIRTDTALSSPLFTAWLEDESKKKSVFDGKRAIVALKWKGIELRGIEFDLLIASYLLNPSQSTEDVASVAKTKQYMAVQSDEAVYGKGAKQTVPDENVLAEHLVRKAAAIRALEKELIHDLQENEQYALFTDLELPLSSILAEMEFTGVKVDVERLKEMGEELTEQLRQVEQEIYKLAGQEFNINSPKQLGVILFEKLQLPVLKKTKTGYSTSADVLEKLAPQHEIVEKILHYRQLGKLQSTYIEGLLKVVHRDTHKVHTIFNQALTQTGRLSSTEPNLQNIPIRLEEGRKIRQAFVPSEPDWVIFSADYSQIELRVLAHIANDENLIDAFRHDLDIHTKTAMDIFHVTADEVTPNMRRQAKAVNFGIVYGISDYGLSQNLNIPRKEAAEFIRRYFESFPGVKQYMENIVQEAKQKGYVTTLLHRRRYLPDITSRNFNLRSFAERTAMNTPIQGSAADIIKKAMIDLADRLKREKLQARMLLQVHDELILEAPREEVERLQQIVPEVMENAIQLTVPLKVDYHYGPTWYDAK

SEQ ID NO: 11 - DNA, 1812 bp, synthetic construct
  misc_feature 1..1812: note = Variant of DNA polymerase
  source 1..1812: mol_type = other DNA
atgcatcaccatcaccatcacggtggcagcggtatggttgcaccacagaccaaaaaagaagaagccgtactgccgaacatcaattatacaattgtggaggaagtcagcgaaccgattctcgcggatcgttcggcgttagtggttgaggttctggaatccaactaccataaggctccgatcctgggctttgccctggccaatgaacacggtaacttcttcattcgcactgacacggctctttcttctccgctgtttaccgcgtggctggaggatgagagcaagaagaaatcagtattcgacggtaaacgcgcaatcgtggccctgaaatggaaaggcattgaattacgtggcatcgaatttgacttgttgctggcttcatatctcctgaatccctcgcaaagcacggaagatgtcgcaagcgtggccaagaccaaacagtacatggcagtacagagtgatgaagcagtctatggaaaaggtgcgaaacaaacggtgccagatgaaaacgttttagccgaacatctggtgcgtaaagctgctgcaattcgcgccctggagaaagaactgatccacgaattgcaggaaaatgaacaatacgccctgtttactgaccttgaattacctctggcgtcgattctggcagagatggaatttaccggtgtgaaagtagatgttgaacgcctgaaagaaatgggcgaggagctcacagaacaactgcgcgcagtggagcaggaaatctataagttagctggccaagaattcaacattaacagccctaaacaactgggtgtcattctgtttgaaaaattacagcttcccgtcctgaagaagacgaagaccggctatagtacgagtgctgatgtgctcgagaaacttgccccgcagcatgaaatcgtcgagaaaattcttcactaccgtcagctcggtaaactgcaatccacatatattgaagggctgctgaaagttgtacatcgcgacacccataaagtccacaccatcttcaaccaggccctgactcaaaccgggcgcctgtcaagcaccgaacctaatctccagaacatcccaattcgtctggaagaaggccgcaaaattcgccaagcatttgtgccatcggaacctgactgggttatctttagcgcagattactcacagattgagctccgtgttctcgcacacattgcaaacgatgaaaatctgatcgatgcttttcgtcatgaccttgacatccatacgaagacagccatggatattttccatgtaacagcagatgaagttaccgcgaatatgcgtcgccaagcaaaagccgtgaacttcggtattgtctatgggatctctgattacggtctgagtcagaaccttaatatcactcgcaaagaagccgccgaatttattcgtcgttatttcgaaatttttcccggcgttaaacagtacatggagaatattgtacaggaagccaaacagaaaggatacgtcaccacccttttacaccgccgccgctatctgccagacatcacctctcgtaatttcaacttacgttcattcgcagaacgcacggccatgaacaccccaattcaaggatcagccgccgacatcatcaagaaggcaatgattgatttagctgatcgtctgaaacgcgagaaacttcaagctcgtctgctgctccaggttcatgacgaactgattcttgaagctcctcgtgaggaagtcgaacgcctgcagcagattgtacccgaggtcatggagaacgccatccagttaaccgtcccactgaaagttgattatcactacggtcctacgtggtacgacgctaag

SEQ ID NO: 12 - protein, 604 aa, synthetic construct
  REGION 1..604: note = Variant of DNA polymerase
MHHHHHHGGSGMVAPQTKKEEAVLPNINYTIVEEVSEPILADRSALVVEVLESNYHKAPILGFALANEHGNFFIRTDTALSSPLFTAWLEDESKKKSVFDGKRAIVALKWKGIELRGIEFDLLLASYLLNPSQSTEDVASVAKTKQYMAVQSDEAVYGKGAKQTVPDENVLAEHLVRKAAAIRALEKELIHELQENEQYALFTDLELPLASILAEMEFTGVKVDVERLKEMGEELTEQLRAVEQEIYKLAGQEFNINSPKQLGVILFEKLQLPVLKKTKTGYSTSADVLEKLAPQHEIVEKILHYRQLGKLQSTYIEGLLKVVHRDTHKVHTIFNQALTQTGRLSSTEPNLQNIPIRLEEGRKIRQAFVPSEPDWVIFSADYSQIELRVLAHIANDENLIDAFRHDLDIHTKTAMDIFHVTADEVTANMRRQAKAVNFGIVYGISDYGLSQNLNITRKEAAEFIRRYFEIFPGVKQYMENIVQEAKQKGYVTTLLHRRRYLPDITSRNFNLRSFAERTAMNTPIQGSAADIIKKAMIDLADRLKREKLQARLLLQVHDELILEAPREEVERLQQIVPEVMENAIQLTVPLKVDYHYGPTWYDAK

SEQ ID NO: 13 - DNA, 1812 bp, synthetic construct
  misc_feature 1..1812: note = Variant of DNA polymerase
  source 1..1812: mol_type = other DNA
atgcatcaccatcaccatcacggtggcagcggtatggttgcaccacagaccaaaaaagaagaagccgtactgccgaacatcaattatacaattgtggaggaagtcagcgaaccgattctcgcggatcgttcggcgttagtggttgaggttctggaatccaactaccataaggctccgatcctgggctttgccctggccaatgaacacggtaacttcttcattcgcactgacacggctctttcttctccgctgtttaccgcgtggctggaggatgagagcaagaagaaatcagtattcgacggtaaacgcgcaatcgtggccctgaaatggaaaggcattgaattacgtggcatcgaatttgacttgttgctggcttcatatctcctgaatccctcgcaaagcacggaagatgtcgcaagcgtggccaagaccaaacagtacatggcagtacagagtgatgaagcagtctatggaaaaggtgcgaaacaaacggtgccagatgaaaacgttttagccgaacatctggtgcgtaaagctgctgcaattcgcgccctggagaaagaactgatccacgatttgcaggaaaatgaacaatacgccctgtttactgaccttgaattacctctgtcctcgattctggcagagatggaatttaccggtgtgaaagtagatgttgaacgcctgaaagaaatgggcgaggagctcacagaacaactgcgcgcagtggagcaggaaatctataagttagctggccaagaattcaacattaacagccctaaacaactgggtgtcattctgtttgaaaaattacagcttcccgtcctgaagaagacgaagaccggctatagtacgagtgctgatgtgctcgagaaacttgccccgcagcatgaaatcgtcgagaaaattcttcactaccgtcagctcggtaaactgcaatccacatatattgaagggctgctgaaagttgtacatcgcgacacccataaagtccacaccatcttcaaccaggccctgactcaaaccgggcgcctgtcaagcaccgaacctaatctccagaacatcccaattcgtctggaagaaggccgcaaaattcgccaagcatttgtgccatcgaaacctgactgggttatctttagcgcagattactcacagattgagctccgtgttctcgcacacattgcaaacgatgaaaatctgatcgatgcttttcgtcatgaccttgacatccatacgaagacagccatggatattttccatgtaacagcagatgaagttacccccaatatgcgtcgccaagcaaaagccgtgaacttcggtattgtctatgggatctctgattacggtctgagtcagaaccttaatatcccacgcaaagaagccgccgaatttattcgtcgttatttcgaaatctttcccggcgttaaacagtacatggagaatattgtacaggaagccaaacagaaaggatacgtcaccacccttttacaccgccgccgctatctgccagacatcacctctcgtaatttcaacttacgttcattcgcagaacgcacggccatgaacaccccaattcaaggatcagccgccgacatcatcaagaaggcaatgattgatttagctgatcgtctgaaacgcgagaaacttcaagctcgtatgctgctccaggttcatgacgaactgattcttgaagctcctcgtgaggaagtcgaacgcctgcagcagattgtacccgaggtcatggagaacgccatccagttaaccgtcccactgaaagttgattatcactacggtcctacgtggtacgacgctaag

SEQ ID NO: 14 - protein, 604 aa, synthetic construct
  REGION 1..604: note = Variant of DNA polymerase
MHHHHHHGGSGMVAPQTKKEEAVLPNINYTIVEEVSEPILADRSALVVEVLESNYHKAPILGFALANEHGNFFIRTDTALSSPLFTAWLEDESKKKSVFDGKRAIVALKWKGIELRGIEFDLLLASYLLNPSQSTEDVASVAKTKQYMAVQSDEAVYGKGAKQTVPDENVLAEHLVRKAAAIRALEKELIHDLQENEQYALFTDLELPLSSILAEMEFTGVKVDVERLKEMGEELTEQLRAVEQEIYKLAGQEFNINSPKQLGVILFEKLQLPVLKKTKTGYSTSADVLEKLAPQHEIVEKILHYRQLGKLQSTYIEGLLKVVHRDTHKVHTIFNQALTQTGRLSSTEPNLQNIPIRLEEGRKIRQAFVPSKPDWVIFSADYSQIELRVLAHIANDENLIDAFRHDLDIHTKTAMDIFHVTADEVTPNMRRQAKAVNFGIVYGISDYGLSQNLNIPRKEAAEFIRRYFEIFPGVKQYMENIVQEAKQKGYVTTLLHRRRYLPDITSRNFNLRSFAERTAMNTPIQGSAADIIKKAMIDLADRLKREKLQARMLLQVHDELILEAPREEVERLQQIVPEVMENAIQLTVPLKVDYHYGPTWYDAK

SEQ ID NO: 15 - DNA, 1812 bp, synthetic construct
  misc_feature 1..1812: note = Variant of DNA polymerase
  source 1..1812: mol_type = other DNA
atgcatcaccatcaccatcacggtggcagcggtatggttgcaccacagaccaaaaaagaagaagccgtactgccgaacatcaattatacaattgtggaggaagtcagcgaaccgattctcgcggatcgttcggcgttagtggttgaggttctgggttccaactaccataaggctccgatcctgggctttgccctggccaatgaacacggtaacttcttcattcgcactgacacggctctttcttctccgctgtttaccgcgtggctggaggatgagagcaagaagaaatcagtattcgacggaaaacgcgcaatcgtggccctgaaatggaaaggcattgaattacgtggcatcgaatttgacttgttgatcgcttcatatctcctgaatccctcgcaaagcacggaagatgtcgcaagcgtggccaagaccaaacagtacatggcagtacagagtgatgaagcagtctatggaaaaggtgcgaaacaaacggtgccagatgaaaacgttttagccgaacatctggtgcgtaaagctgctgcaattcgcgccctggagaaagaactgatccacgatttgcaggaaaatgaacaatacgccctgtttactgaccttgaattacctctgtcctcgattctggcagagatggaatttaccggtgtgaaagtagatgttgaacgcctgaaagaaatgggcgaggagctcacagaacaactgcgcgcagtggagcaggaaatctataagttagctggccaagaattcaacattaacagccctaaacaactgggtgtcattctgtttgaaaaattacagcttcccgtcctgaagaagacgaagaccggctatagtacgagtgctgatgtgctcgagaaacttgccccgcagcatgaaatcgtcgagaaaattcttcactaccgtcagctcggtaaactgcaatccacatatattgaagggctgctgaaagttgtacatcgcgacacccataaagtccacaccatcttcaaccaggccctgactcaaaccgggcgcctgtcaagcaccgaacctaatctccagaacatcccaattcgtctggaagaaggccgcaaaattcgccaagcatttgtgccatcgaaacctgactgggttatctttagcgcagattactcacagattgagctccgtgttctcgcacacattgcaaacgatgaaaatctgatcgatgcttttcgtcatgaccttgacatccatacgaagacagccatggatattttccatgtaacagcagatgaagttacccccaatatgcgtcgccaagcaaaagccgtgaacttcggtattgtctatgggatctctgattacggtctgagtcagaaccttaatatcccacgcaaagaagccgccgaatttattcgtcgttatttcgaaatttttcccggcgttaaacagtacatggagaatattgtacaggaagccaaacagaaaggatacgtcaccacccttttacaccgccgccgctatctgccagacatcacctctcgtaatttcaacttacgttcattcgcagaacgcacggccatgaacaccccaattcaaggatcagccgccgacatcatcaagaaggcaatgattgatttagctgatcgtctgaaacgcgagaaacttcaagctcgtatgctgctccaggttcatgacgaactgattcttgaagctcctcgtgaggaagtcgaacgcctgcagcagattgtacccgaggtcatggagaacgccatccagttaaccgtcccactgaaagttgattatcactacggtcctacgtggtacgacgctaag

SEQ ID NO: 16 - protein, 604 aa, synthetic construct
  REGION 1..604: note = Variant of DNA polymerase
MHHHHHHGGSGMVAPQTKKEEAVLPNINYTIVEEVSEPILADRSALVVEVLGSNYHKAPILGFALANEHGNFFIRTDTALSSPLFTAWLEDESKKKSVFDGKRAIVALKWKGIELRGIEFDLLIASYLLNPSQSTEDVASVAKTKQYMAVQSDEAVYGKGAKQTVPDENVLAEHLVRKAAAIRALEKELIHDLQENEQYALFTDLELPLSSILAEMEFTGVKVDVERLKEMGEELTEQLRAVEQEIYKLAGQEFNINSPKQLGVILFEKLQLPVLKKTKTGYSTSADVLEKLAPQHEIVEKILHYRQLGKLQSTYIEGLLKVVHRDTHKVHTIFNQALTQTGRLSSTEPNLQNIPIRLEEGRKIRQAFVPSKPDWVIFSADYSQIELRVLAHIANDENLIDAFRHDLDIHTKTAMDIFHVTADEVTPNMRRQAKAVNFGIVYGISDYGLSQNLNIPRKEAAEFIRRYFEIFPGVKQYMENIVQEAKQKGYVTTLLHRRRYLPDITSRNFNLRSFAERTAMNTPIQGSAADIIKKAMIDLADRLKREKLQARMLLQVHDELILEAPREEVERLQQIVPEVMENAIQLTVPLKVDYHYGPTWYDAK

SEQ ID NO: 17 - DNA, 1812 bp, synthetic construct
  misc_feature 1..1812: note = Variant of DNA polymerase
  source 1..1812: mol_type = other DNA
atgcatcaccatcaccatcacggtggcagcggtatggttgcaccacagaccaaaaaagaagaagccgtactgccgaacatcaattatacaattgtggaggaagtcagcgaaccgattctcgcggatcgttcggcgttagtggttgaggttctggaatccaactaccataaggctccgatcctgggctttgccctggccaatgaacacggtaacttcttcattcgcactgacacggctctttcttctccgctgtttaccgcgtggctggaggatgagagcaagaagaaatcagtattcgacggaaaacgcgcaatcgtggccctgaaatggaaaggcattgaattacgtggcatcgaatttgacttgttgatcgcttcatatctcctgaatccctcgcaaagcacggaagatgtcgcaagcgtggccaagaccaaacagtacatggcagtacagagtgatgaagcagtctatggaaaaggtgcgaaacaaacggtgccagatgaaaacgttttagccgaacatctggtgcgtaaagctgctgcaattcgcgccctggagaaagaactgatccacgatttgcaggaaaatgaacaatacgccctgtttactgaccttgaattacctctgtcctcgattctggcagagatggaatttaccggtgtgaaagtagatgttgaacgcctgaaagaaatgggcgaggagctcacagaacaactgcgcgcagtggagcaggaaatctataagttagctggccaagaattcaacattaacagccctaaacaactgggtgtcattctgtttgaaaaattacagcttcccgtcctgaagaagacgaagaccggctatagtacgagtgctgatgtgctcgagaaacttgccccgcagcatgaaatcgtcgagaaaattcttcactaccgtcagctcggtaaactgcaatccacatatattgaagggctgctgaaagttgtacatcgcgacacccataaagtccacaccatcttcaaccaggccctgactcaaaccgggcgcctgtcaagcaccgaacctaatctccagaacatcccaattcgtctggaagaaggccgcaaaattcgccaagcatttgtgccatcgaaacctgactgggttatctttagcgcagattactcacagattgagctccgtgttctcgcacacattgcaaacgatgaaaatctgatcgatgcttttcgtcatgaccttgacatccatacgaagacagccatggatattttccatgtaacagcagatgaagttacccccaatatgcgtcgccaagcaaaagccgtgaacttcggtattgtctatgggatctctgattacggtctgagtcagaaccttaatatcccacgcaaagaagccgccgaatttattcgtcgttatttcgaaatttttcccggcgttaaacagtacatggagaatattgtaaaggaagccaaacagaaaggatacgtcaccacccttttacaccgccgccgctatctgccagacatcacctctcgtaatttcaacttacgttcattcgcagaacgcacggccatgaacaccccaattcaaggatcagccgccgacatcatcaagaaggcaatgattgatttagctgatcgtctgaaacgcgagaaacttcaagctcgtatgctgctccaggttcatgacgaactgattcttgaagctcctcgtgaggaagtcgaacgcctgcagcagattgtacccgaggtcatggagaacgccatccagttaaccgtcccactgaaagttgattatcactacggtcctacgtggtacgacgctaag

SEQ ID NO: 18 - protein, 604 aa, synthetic construct
  REGION 1..604: note = Variant of DNA polymerase
MHHHHHHGGSGMVAPQTKKEEAVLPNINYTIVEEVSEPILADRSALVVEVLESNYHKAPILGFALANEHGNFFIRTDTALSSPLFTAWLEDESKKKSVFDGKRAIVALKWKGIELRGIEFDLLIASYLLNPSQSTEDVASVAKTKQYMAVQSDEAVYGKGAKQTVPDENVLAEHLVRKAAAIRALEKELIHDLQENEQYALFTDLELPLSSILAEMEFTGVKVDVERLKEMGEELTEQLRAVEQEIYKLAGQEFNINSPKQLGVILFEKLQLPVLKKTKTGYSTSADVLEKLAPQHEIVEKILHYRQLGKLQSTYIEGLLKVVHRDTHKVHTIFNQALTQTGRLSSTEPNLQNIPIRLEEGRKIRQAFVPSKPDWVIFSADYSQIELRVLAHIANDENLIDAFRHDLDIHTKTAMDIFHVTADEVTPNMRRQAKAVNFGIVYGISDYGLSQNLNIPRKEAAEFIRRYFEIFPGVKQYMENIVKEAKQKGYVTTLLHRRRYLPDITSRNFNLRSFAERTAMNTPIQGSAADIIKKAMIDLADRLKREKLQARMLLQVHDELILEAPREEVERLQQIVPEVMENAIQLTVPLKVDYHYGPTWYDAK

SEQ ID NO: 19 - DNA, 1812 bp, synthetic construct
  misc_feature 1..1812: note = Variant of DNA polymerase
  source 1..1812: mol_type = other DNA
atgcatcaccatcaccatcacggtggcagcggtatggttgcaccacagaccaaaaaagaagaagccgtactgccgaacatcaattatacaattgtggaggaagtcagcgaaccgattctcgcggatcgttcggcgttagtggttgaggttctggaatccaactaccataaggctccgatcctgggctttgccctggccaatgaacacggtaacttcttcattcgcactgacacggctctttcttctccgctgtttaccgcgtggctggaggatgagagcaagaagaaatcagtattcgacggaaaacgcgcaatcgtggccctgaaatggaaaggcattgaattacgtggcatcgaatttgacttgttgatcgcttcatatctcctgaatccctcgcaaagcacggaagatgtcgcaagcgtggccaagaccaaacagtacatggcagtacagagtgatgaagcagtctatggaaaaggtgcgaaacaaacggtgccagatgaaaacgttttagccgaacatctggtgcgtaaagctgctgcaattcgcgccctggagaaagaactgatccacgatttgcaggaaaatgaacaatacgccctgtttactgaccttgaattacctctgtcctcgattctggcagagatggaatttaccggtgtgaaagtagatgttgaacgcctgaaagaaatgggcgaggagctcacagaacaactgcgcgcagtggagcaggaaatctataagttagctggccaagaattcaacattaacagccctaaacaactgggtgtcattctgtttgaaaaattacagcttcccgtcctgaagaagacgaagaccggctatagtacgagtgctgatgtgctcgagaaacttgccccgcagcatgaaatcgtcgagaaaattcttcactaccgtcagctcggtaaactgcaatccacatatattgaagggctgctgaaagttgtacatcgcgacacccataaagtccacaccatcttcaaccaggccctgactcaaaccgggcgcctgtcaagcaccgaacctaatctccagaacatcccaattcgtctggaagaaggccgcaaaattcgccaagcatttgtgccatcggaacctgactgggttatctttagcgcagattactcacagattgagctccgtgttctcgcacacattgcaaacgatgaaaatctgatcgatgcttttcgtcatgaccttgacatccatacgaagacagccatggatattttccatgtaacagcagatgaagttacccccaatatgcgtcgccaagcaaaagccgtgaacttcggtattgtctatgggatctctgattacggtctgagtcagaaccttaatatcccacgcaaagaagccgccgaatttattcgtcgttatttcgaaatttttcccggcgttaaacagtacatggagaatattgtacaggaagccaaacagaaaggatacgtcaccacccttttacaccgccgccgctatctgccagacatcacctctcgtaatttcaacttacgttcattcgcagaacgcacggccatgaacaccccaattcaaggatcagccgccgacatcatcaagaaggcaatgattgatttagctgatcgtctgaaacgcgagaaacttcaagctcgtatgctgctccaggttcatgacgaactgattcttgaagctcctcgtgaggaagtcgaacgcctgcagcagattgtacccgaggtcatggagaacgccatccagttaaccgtcccactgaaagttgattatcactacggtcctacgtggtacgacgctaag

SEQ ID NO: 20 - protein, 604 aa, synthetic construct
  REGION 1..604: note = Variant of DNA polymerase
MHHHHHHGGSGMVAPQTKKEEAVLPNINYTIVEEVSEPILADRSALVVEVLESNYHKAPILGFALANEHGNFFIRTDTALSSPLFTAWLEDESKKKSVFDGKRAIVALKWKGIELRGIEFDLLIASYLLNPSQSTEDVASVAKTKQYMAVQSDEAVYGKGAKQTVPDENVLAEHLVRKAAAIRALEKELIHDLQENEQYALFTDLELPLSSILAEMEFTGVKVDVERLKEMGEELTEQLRAVEQEIYKLAGQEFNINSPKQLGVILFEKLQLPVLKKTKTGYSTSADVLEKLAPQHEIVEKILHYRQLGKLQSTYIEGLLKVVHRDTHKVHTIFNQALTQTGRLSSTEPNLQNIPIRLEEGRKIRQAFVPSEPDWVIFSADYSQIELRVLAHIANDENLIDAFRHDLDIHTKTAMDIFHVTADEVTPNMRRQAKAVNFGIVYGISDYGLSQNLNIPRKEAAEFIRRYFEIFPGVKQYMENIVQEAKQKGYVTTLLHRRRYLPDITSRNFNLRSFAERTAMNTPIQGSAADIIKKAMIDLADRLKREKLQARMLLQVHDELILEAPREEVERLQQIVPEVMENAIQLTVPLKVDYHYGPTWYDAK

SEQ ID NO: 21 - DNA, 1812 bp, synthetic construct
  misc_feature 1..1812: note = Variant of DNA polymerase
  source 1..1812: mol_type = other DNA
atgcatcaccatcaccatcacggtggcagcggtatggttgcaccacagaccaaaaaagaagaagccgtactgccgaacatcaattatacaattgtggaggaagtcagcgaaccgattctcgcggatcgttcggcgttagtggttgaggttctggaatccaactaccataaggctccgatcctgggctttgccctggccaatgaacacggtaacttcttcattcgcactgacacggctctttcttctccgctgtttaccgcgtggctggaggatgagagcaagaagaaatcagtattcgacggaaaacgcgcaatcgtggccctgaaatggaaaggcattgaattacgtggcatcgaatttgacttgttgatcgcttcatatctcctgaatccctcgcaaagcacggaagatgtcgcaagcgtggccaagaccaaacagtacatggcagtacagagtgatgaagcagtctatggaaaaggtgcgaaacaaacggtgccagatgaaaacgttttagccgaacatctggtgcgtaaagctgctgcaattcgcgccctggagaaagaactgatccacgatttgcaggaaaatgaacaatacgccctgtttactgaccttgaattacctctgtcctcgattctggcagagatggaatttaccggtgtgaaagtagatgttgaacgcctgaaagaaatgggcgaggagctcacagaacaactgcgcgcagtggagcaggaaatctataagttagctggccaagaattcaacattaacagccctaaacaactgggtgtcattctgtttgaaaaattacagcttcccgtcctgaagaagacgaagaccggctatagtacgagtgctgatgtgctcgagaaacttgccccgcagcatgaaatcgtcgagaaaattcttcactaccgtcagctcggtaaactgcaatccacatatattgaagggctgctgaaagttgtacatcgcgacacccataaagtccacaccatcttcaaccaggccctgactcaaaccgggcgcctgtcaagcaccgaacctaatctccagaacatcccaattcgtctggaagaaggccgcaaaattcgccaagcatttgtgccatcgaaacctgactgggttatctttagcgcagattactcacagattgagctccgtgttctcgcacacattgcaaacgatgaaaatctgatcgatgcttttcgtcatgaccttgacatccatacgaagacagccatggatattttccatgtaacagcagatgaagttacccccaatatgcgtcgccaagcaaaagccgtgaacttcggtattgtctatgggatctctgattacggtctgagtcagtcgcttaatatcccacgcaaagaagccgccgaatttattcgtcgttatttcgaaatttttcccggcgttaaacagtacatggagaatattgtacaggaagccaaacagaaaggatacgtcaccacccttttacaccgccgccgctatctgccagacatcacctctcgtaatttcaacttacgttcattcgcagaacgcacggccatgaacaccccaattcaaggatcagccgccgacatcatcaagaaggcaatgattgatttagctgatcgtctgaaacgcgagaaacttcaagctcgtatgctgctccaggttcatgacgaactgattcttgaagctcctcgtgaggaagtcgaacgcctgcagcagattgtacccgaggtcatggagaacgccatccagttaaccgtcccactgaaagttgattatcactacggtcctacgtggtacgacgctaag

SEQ ID NO: 22 - protein, 604 aa, synthetic construct
  REGION 1..604: note = Variant of DNA polymerase
MHHHHHHGGSGMVAPQTKKEEAVLPNINYTIVEEVSEPILADRSALVVEVLESNYHKAPILGFALANEHGNFFIRTDTALSSPLFTAWLEDESKKKSVFDGKRAIVALKWKGIELRGIEFDLLIASYLLNPSQSTEDVASVAKTKQYMAVQSDEAVYGKGAKQTVPDENVLAEHLVRKAAAIRALEKELIHDLQENEQYALFTDLELPLSSILAEMEFTGVKVDVERLKEMGEELTEQLRAVEQEIYKLAGQEFNINSPKQLGVILFEKLQLPVLKKTKTGYSTSADVLEKLAPQHEIVEKILHYRQLGKLQSTYIEGLLKVVHRDTHKVHTIFNQALTQTGRLSSTEPNLQNIPIRLEEGRKIRQAFVPSKPDWVIFSADYSQIELRVLAHIANDENLIDAFRHDLDIHTKTAMDIFHVTADEVTPNMRRQAKAVNFGIVYGISDYGLSQSLNIPRKEAAEFIRRYFEIFPGVKQYMENIVQEAKQKGYVTTLLHRRRYLPDITSRNFNLRSFAERTAMNTPIQGSAADIIKKAMIDLADRLKREKLQARMLLQVHDELILEAPREEVERLQQIVPEVMENAIQLTVPLKVDYHYGPTWYDAK

SEQ ID NO: 23 - DNA, 1812 bp, synthetic construct
  misc_feature 1..1812: note = Variant of DNA polymerase
  source 1..1812: mol_type = other DNA
atgcatcaccatcaccatcacggtggcagcggtatggttgcaccacagaccaaaaaagaagaagccgtactgccgaacatcaattatacaattgtggaggaagtcagcgaaccgattctcgcggatcgttcggcgttagtggttgaggttctggaatccaactaccataaggctccgatcctgggctttgccctggccaatgaacacggtaacttcttcattcgcactgacacggctctttcttctccgctgtttaccgcgtggctggaggatgagagcaagaagaaatcagtattcgacggaaaacgcgcaatcgtggccctgaaatggaaaggcattgaattacgtggcatcgaatttgacttgttgatcgcttcatatctcctgaatccctcgcaaagcacggaagatgtcgcaagcgtggccaagaccaaacagtacatggcagtacagagtgatgaagcagtctatggaaaaggtgcgaaacaaacggtgccagatgaaaacgttttagccgaacatctggtgcgtaaagctgctgcaattcgcgccctggagaaagaactgatccacgatttgcaggaaaatgaacaatacgccctgtttactgaccttgaattacctctgtcctcgattctggcagagatggaatttaccggtgtgaaagtagatgttgaacgcctgaaagaaatgggcgaggagctcacagaacaactgcgcgcagtggagcaggaaatctataagttagctggccaagaattcaacattaacagccctaaacaactgggtgtcattctgtttgaaaaattacagcttcccgtcctgaagaagacgaagaccggctatagtacgagtgctgatgtgctcgagaaacttgccccgcagcatgaaatcgtcgctaaaattcttcactaccgtcagctcggtaaactgcaatccacatatattgaagggctgctgaaagttgtacatcgcgacacccataaagtccacaccatcttcaaccaggccctgactcaaaccgggcgcctgtcaagcaccgaacctaatctccagaacatcccaattcgtctggaagaaggccgcaaaattcgccaagcatttgtgccatcgaaacctgactgggttatctttagcgcagattactcacagattgagctccgtgttctcgcacacattgcaaacgatgaaaatctgatcgatgcttttcgtcatgaccttgacatccatacgaagacagccatggatattttccatgtaacagcagatgaagttacccccaatatgcgtcgccaagcaaaagccgtgaacttcggtattgtctatgggatctctgattacggtctgagtcagaaccttaatatcccacgcaaagaagccgccgaatttattcgtcgttatttcgaaatttttcccggcgttaaacagtacatggagaatattgtacaggaagccaaacagaaaggatacgtcaccacccttttacaccgccgccgctatctgccagacatcacctctcgtaatttcaacttacgttcattcgcagaacgcacggccatgaacaccccaattcaaggatcagccgccgacatcatcaagaaggcaatgattgatttagctgatcgtctgaaacgcgagaaacttcaagctcgtatgctgctccaggttcatgacgaactgattcttgaagctcctcgtgaggaagtcgaacgcctgcagcagattgtacccgaggtcatggagaacgccatccagttaaccgtcccactgaaagttgattatcactacggtcctacgtggtacgacgctaag

SEQ ID NO: 24 - protein, 604 aa, synthetic construct
  REGION 1..604: note = Variant of DNA polymerase
MHHHHHHGGSGMVAPQTKKEEAVLPNINYTIVEEVSEPILADRSALVVEVLESNYHKAPILGFALANEHGNFFIRTDTALSSPLFTAWLEDESKKKSVFDGKRAIVALKWKGIELRGIEFDLLIASYLLNPSQSTEDVASVAKTKQYMAVQSDEAVYGKGAKQTVPDENVLAEHLVRKAAAIRALEKELIHDLQENEQYALFTDLELPLSSILAEMEFTGVKVDVERLKEMGEELTEQLRAVEQEIYKLAGQEFNINSPKQLGVILFEKLQLPVLKKTKTGYSTSADVLEKLAPQHEIVAKILHYRQLGKLQSTYIEGLLKVVHRDTHKVHTIFNQALTQTGRLSSTEPNLQNIPIRLEEGRKIRQAFVPSKPDWVIFSADYSQIELRVLAHIANDENLIDAFRHDLDIHTKTAMDIFHVTADEVTPNMRRQAKAVNFGIVYGISDYGLSQNLNIPRKEAAEFIRRYFEIFPGVKQYMENIVQEAKQKGYVTTLLHRRRYLPDITSRNFNLRSFAERTAMNTPIQGSAADIIKKAMIDLADRLKREKLQARMLLQVHDELILEAPREEVERLQQIVPEVMENAIQLTVPLKVDYHYGPTWYDAK

SEQ ID NO: 25 - DNA, 1812 bp, synthetic construct
  misc_feature 1..1812: note = Variant of DNA polymerase
  source 1..1812: mol_type = other DNA
atgcatcaccatcaccatcacggtggcagcggtatggttgcaccacagaccaaaaaagaagaagccgtactgccgaacatcaattatacaattgtggaggaagtcagcgaaccgattctcgcggatcgttcggcgttagtggttgaggttctggaatccaactaccataaggctccgatcctgggctttgccctggccaatgaacacggtaacttcttcattcgcactgacacggctctttcttctccgctgtttaccgcgtggctggaggatgagagcaagaagaaatcagtattcgacggaaaacgcgcaatcgtggccctgaaatggaaaggcattgaattacgtggcatcgaatttgacttgttgatcgcttcatatctcctgaatccctcgcaaagcacggaagatgtcgcaagcgtggccaagaccaaacagtacatggcagtacagagtgatgaagcagtctatggaaaaggtgcgaaacaaacggtgccagatgaaaacgttttagccgaacatctggtgcgtaaagctgctgcaattcgcgccctggagaaagaactgatccacgatttgcaggaaaatgaacaatacgccctgtttactgaccttgaattacctctgtcctcgattctggcagagatggaatttaccggtgtgaaagtagatgttgaacgcctgaaagaaatgggcgaggagctcacagaacaactgcgcgcagtggagcaggaaatctataagttagctggccaagaattcaacattaacagccctaaacaactgggtgtcattctgtttgaaaaattacagcttcccgtcctgaagaagacgaagaccggctatagtacgagtgctgatgtgctcgagaaacttgccccgcagcatgaaatcgtcgagaaaattcttcactaccgtcagctcggtaaactgcaatccacatatattgaagggctgctgaaagttgtacatcgcgacacccataaagtccacaccatcttcaaccaggccctgactcaaaccgggcgcctgtcaagcaccgaacctaatctccagaacatcccaattcgtctggaagaaggccgcaaaattcgccaagcatttgtgccatcgaaacctgactgggttatctttagcgcagattactcacagattgagctccgtgttctcgcacacttggcaaacgatgaaaatctgatcgatgcttttcgtcatgaccttgacatccatacgaagacagccatggatattttccatgtaacagcagatgaagttacccccaatatgcgtcgccaagcaaaagccgtgaacttcggtattgtctatgggatctctgattacggtctgagtcagaaccttaatatcccacgcaaagaagccgccgaatttattcgtcgttatttcgaaatttttcccggcgttaaacagtacatggagaatattgtacaggaagccaaacagaaaggatacgtcaccacccttttacaccgccgccgctatctgccagacatcacctctcgtaatttcaacttacgttcattcgcagaacgcacggccatgaacaccccaattcaaggatcagccgccgacatcatcaagaaggcaatgattgatttagctgatcgtctgaaacgcgagaaacttcaagctcgtatgctgctccaggttcatgacgaactgattcttgaagctcctcgtgaggaagtcgaacgcctgcagcagattgtacccgaggtcatggagaacgccatccagttaaccgtcccactgaaagttgattatcactacggtcctacgtggtacgacgctaag

SEQ ID NO: 26 - protein, 604 aa, synthetic construct
  REGION 1..604: note = Variant of DNA polymerase
MHHHHHHGGSGMVAPQTKKEEAVLPNINYTIVEEVSEPILADRSALVVEVLESNYHKAPILGFALANEHGNFFIRTDTALSSPLFTAWLEDESKKKSVFDGKRAIVALKWKGIELRGIEFDLLIASYLLNPSQSTEDVASVAKTKQYMAVQSDEAVYGKGAKQTVPDENVLAEHLVRKAAAIRALEKELIHDLQENEQYALFTDLELPLSSILAEMEFTGVKVDVERLKEMGEELTEQLRAVEQEIYKLAGQEFNINSPKQLGVILFEKLQLPVLKKTKTGYSTSADVLEKLAPQHEIVEKILHYRQLGKLQSTYIEGLLKVVHRDTHKVHTIFNQALTQTGRLSSTEPNLQNIPIRLEEGRKIRQAFVPSKPDWVIFSADYSQIELRVLAHLANDENLIDAFRHDLDIHTKTAMDIFHVTADEVTPNMRRQAKAVNFGIVYGISDYGLSQNLNIPRKEAAEFIRRYFEIFPGVKQYMENIVQEAKQKGYVTTLLHRRRYLPDITSRNFNLRSFAERTAMNTPIQGSAADIIKKAMIDLADRLKREKLQARMLLQVHDELILEAPREEVERLQQIVPEVMENAIQLTVPLKVDYHYGPTWYDAK

SEQ ID NO: 27 - DNA, 1812 bp, synthetic construct
  misc_feature 1..1812: note = Variant of DNA polymerase
  source 1..1812: mol_type = other DNA
atgcatcaccatcaccatcacggtggcagcggtatggttgcaccacagaccaaaaaagaagaagccgtactgccgaacatcaattatacaattgtggaggaagtcagcgaaccgattctcgcggatcgttcggcgttagtggttgaggttctggaatccaactaccataaggctccgatcctgggctttgccctggccaatgaacacggtaacttcttcattcgcactgacacggctctttcttctccgctgtttaccgcgtggctggaggatgagagcaagaagaaatcagtattcgacggaaaacgcgcaatcgtggccctgaaatggaaaggcattgaattacgtggcatcgaatttgacttgttgatcgcttcatatctcctgaatccctcgcaaagcacggaagatgtcgcaagcgtggccaagaccaaacagtacatggcagtacagagtgatgaagcagtctatggaaaaggtgcgaaacaaacggtgccagatgaaaacgttttagccgaacatctggtgcgtaaagctgctgcaattcgcgccctggagaaagaactgatccacgatttgcaggaaaatgaacaatacgccctgtttactgaccttgaattacctctgtcctcgattctggcagagatggaatttaccggtgtgaaagtagatgttgaacgcctgaaagaaatgggcgaggagctcacagaacaactgcgcgcagtggagcaggaaatctataagttagctggccaagaattcaacattaacagccctaaacaactgggtgtcattctgtttgaaaaattacagcttcccgtcctgaagaagacgaagaccggctatagtacgagtgctgatgtgctcgagaaacttgccccgcagcatgaaatcgtcgggaaaattcttcactaccgtcagctcggtaaactgcaatccacatatattgaagggctgctgaaagttgtacatcgcgacacccataaagtccacaccatcttcaaccaggccctgactcaaaccgggcgcctgtcaagcaccgaacctaatctccagaacatcccaattcgtctggaagaaggccgcaaaattcgccaagcatttgtgccatcgaaacctgactgggttatctttagcgcagattactcacagattgagctccgtgttctcgcacacattgcaaacgatgaaaatctgatcgatgcttttcgtcatgaccttgacatccatacgaagacagccatggatattttccatgtaacagcagatgaagttacccccaatatgcgtcgccaagcaaaagccgtgaacttcggtattgtctatgggatctctgattacggtctgagtcagaaccttaatatcccacgcaaagaagccgccgaatttattcgtcgttatttcgaaatttttcccggcgttaaacagtacatggagaatattgtacaggaagccaaacagaaaggatacgtcaccacccttttacaccgccgccgctatctgccagacatcacctctcgtaatttcaacttacgttcattcgcagaacgcacggccatgaacaccccaattcaaggatcagccgccgacatcatcaagaaggcaatgattgatttagctgatcgtctgaaacgcgagaaacttcaagctcgtatgctgctccaggttcatgacgaactgattcttgaagctcctcgtgaggaagtcgaacgcctgcagcagattgtacccgaggtcatggagaacgccatccagttaaccgtcccactgaaagttgattatcactacggtcctacgtggtacgacgctaag

SEQ ID NO: 28 - protein, 604 aa, synthetic construct
  REGION 1..604: note = Variant of DNA polymerase
MHHHHHHGGSGMVAPQTKKEEAVLPNINYTIVEEVSEPILADRSALVVEVLESNYHKAPILGFALANEHGNFFIRTDTALSSPLFTAWLEDESKKKSVFDGKRAIVALKWKGIELRGIEFDLLIASYLLNPSQSTEDVASVAKTKQYMAVQSDEAVYGKGAKQTVPDENVLAEHLVRKAAAIRALEKELIHDLQENEQYALFTDLELPLSSILAEMEFTGVKVDVERLKEMGEELTEQLRAVEQEIYKLAGQEFNINSPKQLGVILFEKLQLPVLKKTKTGYSTSADVLEKLAPQHEIVGKILHYRQLGKLQSTYIEGLLKVVHRDTHKVHTIFNQALTQTGRLSSTEPNLQNIPIRLEEGRKIRQAFVPSKPDWVIFSADYSQIELRVLAHIANDENLIDAFRHDLDIHTKTAMDIFHVTADEVTPNMRRQAKAVNFGIVYGISDYGLSQNLNIPRKEAAEFIRRYFEIFPGVKQYMENIVQEAKQKGYVTTLLHRRRYLPDITSRNFNLRSFAERTAMNTPIQGSAADIIKKAMIDLADRLKREKLQARMLLQVHDELILEAPREEVERLQQIVPEVMENAIQLTVPLKVDYHYGPTWYDAK

SEQ ID NO: 29 - DNA, 1812 bp, synthetic construct
  misc_feature 1..1812: note = Variant of DNA polymerase
  source 1..1812: mol_type = other DNA
atgcatcaccatcaccatcacggtggcagcggtatggttgcaccacagaccaaaaaagaagaagccgtactgccgaacatcaattatacaattgtggaggaagtcagcgaaccgattctcgcggatcgttcggcgttagtggttgaggttctggaatccaactaccataaggctccgatcctgggctttgccctggccaatgaacacggtaacttcttcattcgcactgacacggctctttcttctccgctgtttaccgcgtggctggaggatgagagcaagaagaaatcagtattcgacggaaaacgcgcaatcgtggccctgaaatggaaaggcattgaattacgtggcatcgaatttgacttgttgatcgcttcatatctcctgaatccctcgcaaagcacggaagatgtcgcaagcgtggccaagaccaaacagtacatggcagtacagagtgatgaagcagtctatggaaaaggtgcgaaacaaacggtgccagatgaaaacgttttagccgaacatctggtgcgtaaagctgctgcaattcgcgccctggagaaagaactgatccacgatttgcaggaaaatgaacaatacgccctgtttactgaccttgaattacctctgtcctcggtgctggcagagatggaatttaccggtgtgaaagtagatgttgaacgcctgaaagaaatgggcgaggagctcacagaacaactgcgcgcagtggagcaggaaatctataagttagctggccaagaattcaacattaacagccctaaacaactgggtgtcattctgtttgaaaaattacagcttcccgtcctgaagaagacgaagaccggctatagtacgagtgctgatgtgctcgagaaacttgccccgcagcatgaaatcgtcgagaaaattcttcactaccgtcagctcggtaaactgcaatccacatatattgaagggctgctgaaagttgtacatcgcgacacccataaagtccacaccatcttcaaccaggccctgactcaaaccgggcgcctgtcaagcaccgaacctaatctccagaacatcccaattcgtctggaagaaggccgcaaaattcgccaagcatttgtgccatcgaaacctgactgggttatctttagcgcagattactcacagattgagctccgtgttctcgcacacattgcaaacgatgaaaatctgatcgatgcttttcgtcatgaccttgacatccatacgaagacagccatggatattttccatgtaacagcagatgaagttacccccaatatgcgtcgccaagcaaaagccgtgaacttcggtattgtctatgggatctctgattacggtctgagtcagaaccttaatatcccacgcaaagaagccgccgaatttattcgtcgttatttcgaaatttttcccggcgttaaacagtacatggagaatattgtacaggaagccaaacagaaaggatacgtcaccacccttttacaccgccgccgctatctgccagacatcacctctcgtaatttcaacttacgttcattcgcagaacgcacggccatgaacaccccaattcaaggatcagccgccgacatcatcaagaaggcaatgattgatttagctgatcgtctgaaacgcgagaaacttcaagctcgtatgctgctccaggttcatgacgaactgattcttgaagctcctcgtgaggaagtcgaacgcctgcagcagattgtacccgaggtcatggagaacgccatccagttaaccgtcccactgaaagttgattatcactacggtcctacgtggtacgacgctaag

SEQ ID NO: 30 - protein, 604 aa, synthetic construct
  REGION 1..604: note = Variant of DNA polymerase
MHHHHHHGGSGMVAPQTKKEEAVLPNINYTIVEEVSEPILADRSALVVEVLESNYHKAPILGFALANEHGNFFIRTDTALSSPLFTAWLEDESKKKSVFDGKRAIVALKWKGIELRGIEFDLLIASYLLNPSQSTEDVASVAKTKQYMAVQSDEAVYGKGAKQTVPDENVLAEHLVRKAAAIRALEKELIHDLQENEQYALFTDLELPLSSVLAEMEFTGVKVDVERLKEMGEELTEQLRAVEQEIYKLAGQEFNINSPKQLGVILFEKLQLPVLKKTKTGYSTSADVLEKLAPQHEIVEKILHYRQLGKLQSTYIEGLLKVVHRDTHKVHTIFNQALTQTGRLSSTEPNLQNIPIRLEEGRKIRQAFVPSKPDWVIFSADYSQIELRVLAHIANDENLIDAFRHDLDIHTKTAMDIFHVTADEVTPNMRRQAKAVNFGIVYGISDYGLSQNLNIPRKEAAEFIRRYFEIFPGVKQYMENIVQEAKQKGYVTTLLHRRRYLPDITSRNFNLRSFAERTAMNTPIQGSAADIIKKAMIDLADRLKREKLQARMLLQVHDELILEAPREEVERLQQIVPEVMENAIQLTVPLKVDYHYGPTWYDAK

SEQ ID NO: 31 - DNA, 1812 bp, synthetic construct
  misc_feature 1..1812: note = Variant of DNA polymerase
  source 1..1812: mol_type = other DNA
atgcatcaccatcaccatcacggtggcagcggtatggttgcaccacagaccaaaaaagaagaagccgtactgccgaacatcaattatacaattgtggaggaagtcagcgaaccgattctcgcggatcgttcggcgttagtggttgaggttctggggtccaactaccataaggctccgatcctgggctttgccctgaccaatgaacacggtaacttcttcattcgcactgacacggctctttcttctccgctgtttaccgcgtggctggaggatgagagcaagaagaaatcagtattcgacggaaaacgcgcaatcgtggccctgaaatggaaaggcattgaattacgtggcatcgaatttgacttgttgatcgcttcatatctcctgaatccctcgcaaagcacggaagatgtcgcaagcgtggccaagaccaaacagtacatggcagtacagagtgatgaagcagtctatggaaaaggtgcgaaacaaacggtgccagatgaaaacgttttagccgaacatctggtgcgtaaagctgctgcaattcgcgccctggagaaagaactgatccacgatttgcaggaaaatgaacaatacgccctgtttactgaccttgaattacctctgtcctcgattctggcagagatggaatttaccggtgtgaaagtagatgttgaacgcctgaaagaaatgggcgaggagctcacagaacaactgcgcgcagtggagcaggaaatctataagttagctggccaagaattcaacattaacagccctaaacaactgggtgtcattctgtttgaaaaattacagcttcccgtcctgaagaagacgaagaccggctatagtacgagtgctgatgtgctcgagaaacttgccccgcagcatgaaatcgtcgagaaaattcttcactaccgtcagctcggtaaactgcaatccacatatattgaagggctgctgaaagttgtacatcgcgacacccataaagtccacaccatcttcaaccaggccctgactcaaaccgggcgcctgtcaagcaccgaacctaatctccagaacatcccaattcgtctggaagaaggccgcaaaattcgccaagcatttgtgccatcgaaacctgactgggttatctttagcgcagattactcacagattgagctccgtgttctcgcacacattgcaaacgatgaaaatctgatcgatgcttttcgtcatgaccttgacatccatacgaagacagccatggatattttccatgtaacagcagatgaagttacccccaatatgcgtcgccaagcaaaagccgtgaacttcggtattgtctatgggatctctgattacggtctgagtcagaaccttaatatcccacgcaaagaagccgccgaatttattcgtcgttatttcgaaatttttcccggcgttaaacagtacatggagaatattgtacaggaagccaaacagaaaggatacgtcaccacccttttacaccgccgccgctatctgccagacatcacctctcgtaatttcaacttacgttcattcgcagaacgcacggccatgaacaccccaattcaaggatcagccgccgacatcatcaagaaggcaatgattgatttagctgatcgtctgaaacgcgagaaacttcaagctcgtatgctgctccaggttcatgacgaactgattcttgaagctcctcgtgaggaagtcgaacgcctgcagcagattgtacccgaggtcatggagaacgccatccagttaaccgtcccactgaaagttgattatcactacggtcctacgtggtacgacgctaag

SEQ ID NO: 32 - protein, 604 aa, synthetic construct
  REGION 1..604: note = Variant of DNA polymerase
MHHHHHHGGSGMVAPQTKKEEAVLPNINYTIVEEVSEPILADRSALVVEVLGSNYHKAPILGFALTNEHGNFFIRTDTALSSPLFTAWLEDESKKKSVFDGKRAIVALKWKGIELRGIEFDLLIASYLLNPSQSTEDVASVAKTKQYMAVQSDEAVYGKGAKQTVPDENVLAEHLVRKAAAIRALEKELIHDLQENEQYALFTDLELPLSSILAEMEFTGVKVDVERLKEMGEELTEQLRAVEQEIYKLAGQEFNINSPKQLGVILFEKLQLPVLKKTKTGYSTSADVLEKLAPQHEIVEKILHYRQLGKLQSTYIEGLLKVVHRDTHKVHTIFNQALTQTGRLSSTEPNLQNIPIRLEEGRKIRQAFVPSKPDWVIFSADYSQIELRVLAHIANDENLIDAFRHDLDIHTKTAMDIFHVTADEVTPNMRRQAKAVNFGIVYGISDYGLSQNLNIPRKEAAEFIRRYFEIFPGVKQYMENIVQEAKQKGYVTTLLHRRRYLPDITSRNFNLRSFAERTAMNTPIQGSAADIIKKAMIDLADRLKREKLQARMLLQVHDELILEAPREEVERLQQIVPEVMENAIQLTVPLKVDYHYGPTWYDAK

SEQ ID NO: 33 - DNA, 1812 bp, synthetic construct
  misc_feature 1..1812: note = Variant of DNA polymerase
  source 1..1812: mol_type = other DNA
atgcatcaccatcaccatcacggtggcagcggtatggttgcaccacagaccaaaaaagaagaagccgtactgccgaacatcaattatacaattgtggaggaagtcagcgaaccgattctcgcggatcgttcggcgttagtggttgaggttctggaatccaactaccataaggctccgatcctgggctttgccctggccaatgaacacggtaacttcttcattcgcactgacacggctctttcttctccgctgtttaccgcgtggctggaggatgagagcaagaagaaatcagtattcgacggaaaacgcgcaatcgtggccctgaaatggaaaggcattgaattacgtggcatcgaatttgacttgttgatcgcttcatatctcctgaatccctcgaggagcacggaagatgtcgcaagcgtggccaagaccaaacagtacatggcagtacagagtgatgaagcagtctatggaaaaggtgcgaaacaaacggtgccagatgaaaacgttttagccgaacatctggtgcgtaaagctgctgcaattcgcgccctggagaaagaactgatccacgatttgcaggaaaatgaacaatacgccctgtttactgaccttgaattacctctgtcctcgattctggcagagatggaatttaccggtgtgaaagtagatgttgaacgcctgaaagaaatgggcgaggagctcacagaacaactgcgcgcagtggagcaggaaatctataagttagctggccaagaattcaacattaacagccctaaacaactgggtgtcattctgtttgaaaaattacagcttcccgtcctgaagaagacgaagaccggctatagtacgagtgctgatgtgctcgagaaacttgccccgcagcatgaaatcgtcgagaaaattcttcactaccgtcagctcggtaaactgcaatccacatatattgaagggctgctgaaagttgtacatcgcgacacccataaagtccacaccatcttcaaccaggccctgactcaaaccgggcgcctgtcaagcaccgaacctaatctccagaacatcccaattcgtctggaagaaggccgcaaaattcgccaagcatttgtgccatcgaaacctgactgggttatctttagcgcagattactcacagattgagctccgtgttctcgcacacattgcaaacgatgaaaatctgatcgatgcttttcgtcatgaccttgacatccatacgaagacagccatggatattttccatgtaacagcagatgaagttacccccaatatgcgtcgccaagcaaaagccgtgaacttcggtattgtctatgggatctctgattacggtctgagtcagaaccttaatatcccacgcaaagaagccgccgaatttattcgtcgttatttcgaaatttttcccggcgttaaacagtacatggagaatattgtacaggaagccaaacagaaaggatacgtcaccacccttttacaccgccgccgctatctgccagacatcacctctcgtaatttcaacttacgttcattcgcagaacgcacggccatgaacaccccaattcaaggatcagccgccgacatcatcaagaaggcaatgattgatttagctgatcgtctgaaacgcgagaaacttcaagctcgtatgctgctccaggttcatgacgaactgattcttgaagctcctcgtgaggaagtcgaacgcctgcagcagattgtacccgaggtcatggagaacgccatccagttaaccgtcccactgaaagttgattatcactacggtcctacgtggtacgacgctaag

SEQ ID NO: 34 - protein, 604 aa, synthetic construct
  REGION 1..604: note = Variant of DNA polymerase
MHHHHHHGGSGMVAPQTKKEEAVLPNINYTIVEEVSEPILADRSALVVEVLESNYHKAPILGFALANEHGNFFIRTDTALSSPLFTAWLEDESKKKSVFDGKRAIVALKWKGIELRGIEFDLLIASYLLNPSRSTEDVASVAKTKQYMAVQSDEAVYGKGAKQTVPDENVLAEHLVRKAAAIRALEKELIHDLQENEQYALFTDLELPLSSILAEMEFTGVKVDVERLKEMGEELTEQLRAVEQEIYKLAGQEFNINSPKQLGVILFEKLQLPVLKKTKTGYSTSADVLEKLAPQHEIVEKILHYRQLGKLQSTYIEGLLKVVHRDTHKVHTIFNQALTQTGRLSSTEPNLQNIPIRLEEGRKIRQAFVPSKPDWVIFSADYSQIELRVLAHIANDENLIDAFRHDLDIHTKTAMDIFHVTADEVTPNMRRQAKAVNFGIVYGISDYGLSQNLNIPRKEAAEFIRRYFEIFPGVKQYMENIVQEAKQKGYVTTLLHRRRYLPDITSRNFNLRSFAERTAMNTPIQGSAADIIKKAMIDLADRLKREKLQARMLLQVHDELILEAPREEVERLQQIVPEVMENAIQLTVPLKVDYHYGPTWYDAK

SEQ ID NO: 35 - DNA, 1812 bp, synthetic construct
  misc_feature 1..1812: note = Variant of DNA polymerase
  source 1..1812: mol_type = other DNA
atgcatcaccatcaccatcacggtggcagcggtatggttgcaccacagaccaaaaaagaagaagccgtactgccgaacatcaattatacaattgtggaggaagtcagcgaaccgattctcgcggatcgttcggcgttagtggttgaggttctggaatccaactaccataaggctccgatcctgggctttgccctggccaatgaacacggtaacttcttcattcgcactgacacggctctttcttctccgctgtttaccgcgtggctggaggatgagagcaagaagaaatcagtattcgacggaaaacgcgcaatcgtggccctgaaatggaaaggcattgaattacgtggcatcgaatttgacttgttgatcgcttcatatctcctgaatccctcgcaaagcacggaagatgtcgcaagcgtggccaagaccaaacagtacatggcagtacagagtgatgaagcagtctatggaaaaggtgcgaaacaaacggtgccagatgaaaacgttttagccgaacatctggtgcgtaaagctgctgcaattcgcgccctggagaaagaactgatccacgatttgcaggaaaatgaacaatacgccctgtttactgaccttgaattacctctgtcctcgattctggcagagatggaatttaccggtgtgaaagtagatgttgaacgcctgaaagaaatgggcgaggagctcacagaacaactgcgcgcagtggagcaggaaatctataagttagctggccaagaattcaacattaacagccctaaacaactgggtgtcattctgtttgaaaaattacagcttcccgtcctgaagaagacgaagaccggctatagtacgagtgctgatgtgctcgagaaacttgccccgcagcatgaaatcgtcgagaaaattcttcactaccgtcagctcggtaaactgcaatccacatatattgaagggctgctgaaagttgtacatcgcgacacccataaagtccacaccatcttcaaccaggccctgactcaaaccgggcgcctgtcaagcaccgaacctaatctccagaacatcccaattcgtctggaagaaggccgcaaaattcgccaagcatttgtgccatcgaaacctgactgggttatctttagcgcagattactcacagattgagctccgtgttctcgcacacattgcaaacgatgaaaatctgatcgatgcttttcgtcatgaccttgacatccatacgaagacagccatggatattttccatgtaacagcagatgaagttacccccaatatgcgtcgccaagcaaaagccgtgaacttcggtattgtctatgggatctctgattacggtctgagtcagaaccttggtatcccacgcaaagaagccgccgaatttattcgtcgttatttcgaaatttttcccggcgttaaacagtacatggagaatattgtacaggaagccaaacagaaaggatacgtcaccacccttttacaccgccgccgctatctgccagacatcacctctcgtaatttcaacttacgttcattcgcagaacgcacggccatgaacaccccaattcaaggatcagccgccgacatcatcaagaaggcaatgattgatttagctgatcgtctgaaacgcgagaaacttcaagctcgtatgctgctccaggttcatgacgaactgattcttgaagctcctcgtgaggaagtcgaacgcctgcagcagattgtacccgaggtcatggagaacgccatccagttaaccgtcccactgaaagttgattatcactacggtcctacgtggtacgacgctaag

SEQ ID NO: 36 - protein, 604 aa, synthetic construct
  REGION 1..604: note = Variant of DNA polymerase
MHHHHHHGGSGMVAPQTKKEEAVLPNINYTIVEEVSEPILADRSALVVEVLESNYHKAPILGFALANEHGNFFIRTDTALSSPLFTAWLEDESKKKSVFDGKRAIVALKWKGIELRGIEFDLLIASYLLNPSQSTEDVASVAKTKQYMAVQSDEAVYGKGAKQTVPDENVLAEHLVRKAAAIRALEKELIHDLQENEQYALFTDLELPLSSILAEMEFTGVKVDVERLKEMGEELTEQLRAVEQEIYKLAGQEFNINSPKQLGVILFEKLQLPVLKKTKTGYSTSADVLEKLAPQHEIVEKILHYRQLGKLQSTYIEGLLKVVHRDTHKVHTIFNQALTQTGRLSSTEPNLQNIPIRLEEGRKIRQAFVPSKPDWVIFSADYSQIELRVLAHIANDENLIDAFRHDLDIHTKTAMDIFHVTADEVTPNMRRQAKAVNFGIVYGISDYGLSQNLGIPRKEAAEFIRRYFEIFPGVKQYMENIVQEAKQKGYVTTLLHRRRYLPDITSRNFNLRSFAERTAMNTPIQGSAADIIKKAMIDLADRLKREKLQARMLLQVHDELILEAPREEVERLQQIVPEVMENAIQLTVPLKVDYHYGPTWYDAK

SEQ ID NO: 37 - DNA, 1812 bp, synthetic construct
  misc_feature 1..1812: note = Variant of DNA polymerase
  source 1..1812: mol_type = other DNA
atgcatcaccatcaccatcacggtggcagcggtatggttgcaccacagaccaaaaaagaagaagccgtactgccgaacatcaattatacaattgtggaggaagtcagcgaaccgattctcgcggatcgttcggcgttagtggttgaggttctggaatccaactaccataaggctccgatcctgggctttgccctggccaatgaacacggtaacttcttcattcgcactgacacggctctttcttctccgctgtttaccgcgtggctggaggatgagagcaagaagaaatcagtattcgacggaaaacgcgcaatcgtggccctgaaatggaaaggcattgaattacgtggcatcgaatttgacttgttgatcgcttcatatctcctgaatccctcgcaaagcacggaagatgtcgcaagcgtggccaagaccaaacagtacatggcagtacagagtgattgggcagtctatggaaaaggtgcgaaacaaacggtgccagatgaaaacgttttagccgaacatctggtgcgtaaagctgctgcaattcgcgccctggagaaagaactgatccacgatttgcaggaaaatgaacaatacgccctgtttactgaccttgaattacctctgtcctcgattctggcagagatggaatttaccggtgtgaaagtagatgttgaacgcctgaaagaaatgggcgaggagctcacagaacaactgcgcgcagtggagcaggaaatctataagttagctggccaagaattcaacattaacagccctaaacaactgggtgtcattctgtttgaaaaattacagcttcccgtcctgaagaagacgaagaccggctatagtacgagtgctgatgtgctcgagaaacttgccccgcagcatgaaatcgtcgagaaaattcttcactaccgtcagctcggtaaactgcaatccacatatattgaagggctgctgaaagttgtacatcgcgacacccataaagtccacaccatcttcaaccaggccctgactcaaaccgggcgcctgtcaagcaccgaacctaatctccagaacatcccaattcgtctggaagaaggccgcaaaattcgccaagcatttgtgccatcgaaacctgactgggttatctttagcgcagattactcacagattgagctccgtgttctcgcacacattgcaaacgatgaaaatctgatcgatgcttttcgtcatgaccttgacatccatacgaagacagccatggatattttccatgtaacagcagatgaagttacccccaatatgcgtcgccaagcaaaagccgtgaacttcggtattgtctatgggatctctgattacggtctgagtcagaaccttaatatcccacgcaaagaagccgccgaatttattcgtcgttatttcgaaatttttcccggcgttaaacagtacatggagaatattgtacaggaagccaaacagaaaggatacgtcaccacccttttacaccgccgccgctatctgccagacatcacctctcgtaatttcaacttacgttcattcgcagaacgcacggccatgaacaccccaattcaaggatcagccgccgacatcatcaagaaggcaatgattgatttagctgatcgtctgaaacgcgagaaacttcaagctcgtatgctgctccaggttcatgacgaactgattcttgaagctcctcgtgaggaagtcgaacgcctgcagcagattgtacccgaggtcatggagaacgccatccagttaaccgtcccactgaaagttgattatcactacggtcctacgtggtacgacgctaag

SEQ ID NO: 38 - protein, 604 aa, synthetic construct
  REGION 1..604: note = Variant of DNA polymerase
MHHHHHHGGSGMVAPQTKKEEAVLPNINYTIVEEVSEPILADRSALVVEVLESNYHKAPILGFALANEHGNFFIRTDTALSSPLFTAWLEDESKKKSVFDGKRAIVALKWKGIELRGIEFDLLIASYLLNPSQSTEDVASVAKTKQYMAVQSDWAVYGKGAKQTVPDENVLAEHLVRKAAAIRALEKELIHDLQENEQYALFTDLELPLSSILAEMEFTGVKVDVERLKEMGEELTEQLRAVEQEIYKLAGQEFNINSPKQLGVILFEKLQLPVLKKTKTGYSTSADVLEKLAPQHEIVEKILHYRQLGKLQSTYIEGLLKVVHRDTHKVHTIFNQALTQTGRLSSTEPNLQNIPIRLEEGRKIRQAFVPSKPDWVIFSADYSQIELRVLAHIANDENLIDAFRHDLDIHTKTAMDIFHVTADEVTPNMRRQAKAVNFGIVYGISDYGLSQNLNIPRKEAAEFIRRYFEIFPGVKQYMENIVQEAKQKGYVTTLLHRRRYLPDITSRNFNLRSFAERTAMNTPIQGSAADIIKKAMIDLADRLKREKLQARMLLQVHDELILEAPREEVERLQQIVPEVMENAIQLTVPLKVDYHYGPTWYDAK

SEQ ID NO: 39 - DNA, 1812 bp, synthetic construct
  misc_feature 1..1812: note = Variant of DNA polymerase
  source 1..1812: mol_type = other DNA
atgcatcaccatcaccatcacggtggcagcggtatggttgcaccacagaccaaaaaagaagaagccgtactgccgaacatcaattatacaattgtggaggaagtcagcgaaccgattctcgcggatcgttcggcgttagtggttgaggttctggaatccaactaccataaggctccgatcctgggctttgccctggccaatgaacacggtaacttcttcattcgcactgacacggctctttcttctccgctgtttaccgcgtggctggaggatgagagcaagaagaaatcagtattcgacggaaaacgcgcaatcgtggccctgaaatggaaaggcattgaattacgtggcatcgaatttgacttgttgatcgcttcatatctcctgaatccctcgcaaagcacggaagatgtcgcaagcgtggccaagaccaaacagtacatggcagtacagagtgatgaagcagtctatggaaaaggtgcgaaacaaacggtgccagatgaaaacgttttagccgaacatctggtgcgtaaagctgctgcaattcgcgccctggagaaagaactgatccacgatttgcaggaaaatgaacaatacgccctgtttactgaccttgaattacctctgtcctcgattctggcagagatggaatttaccggtgtgaaagtagatgttgaacgcctgaaagaaatgggcgaggagctcacagaacaactgcgcgcagtggagcaggaaatctataagttagctggccaagaattcaacattaacagccctaaacaactgggtgtcattctgtttgaaaaattacagcttcccgtcctgaagaagacgaagaccggctatagtacgagtgctgatgtgctcgagaaacttgccccgcagcatgaaatcgtcgagaaaattcttcactaccgtcagctcggtaaactgcaatccacatatattgaagggctgctgaaagttgtacatcgcgacacccataaagtccacaccatcttcaaccaggccctgactcaaaccgggcgcctgtcaagcaccgaacctaatctccagaacatcccaattcgtctggaagaaggccgcaaaattcgccaagcatttgtgccatcgaaacctgactgggttatctttagcgcagattactcacagattgagctccgtgttctcgcacacattgcaaacgatgaaaatctgatcgatgcttttcgtcatgaccttgacatccatacgaagacagccatggatattttccatgtaacagcagatgaagttacccccaatatgcgtcgccaagcaaaagccgtgaacttcggtattgtctatgggatctctgattacggtctgagtcagaaccttaatatcccacgcaaagaagccgccgaatttattcgtcgttatttcgaaatttttcccggcgttaaacagtacatggagaatattgtacaggaagccaaacagaaaggatacgtcaccacccttttacaccgccgccgctatctgccagacatcacctctcgtaatttcaacttacgttcattcgcagaacgcacggccatgaacaccccaattcaaggatcagccgccgacatcatcaagaaggcaatgattgatttagctgatcgtctgaaacgcgagaaacttcaagctcgtatgctgctccaggttcatgacgaactgattcttgaagctcctcgtgaggaagtcgaacgcctgcagcagattgtacccgaggtcatggagaacgccatccagttaaccgtcccactgaaagtttcgtatcactacggtcctacgtggtacgacgctaag

SEQ ID NO: 40 - protein, 604 aa, synthetic construct
  REGION 1..604: note = Variant of DNA polymerase
MHHHHHHGGSGMVAPQTKKEEAVLPNINYTIVEEVSEPILADRSALVVEVLESNYHKAPILGFALANEHGNFFIRTDTALSSPLFTAWLEDESKKKSVFDGKRAIVALKWKGIELRGIEFDLLIASYLLNPSQSTEDVASVAKTKQYMAVQSDEAVYGKGAKQTVPDENVLAEHLVRKAAAIRALEKELIHDLQENEQYALFTDLELPLSSILAEMEFTGVKVDVERLKEMGEELTEQLRAVEQEIYKLAGQEFNINSPKQLGVILFEKLQLPVLKKTKTGYSTSADVLEKLAPQHEIVEKILHYRQLGKLQSTYIEGLLKVVHRDTHKVHTIFNQALTQTGRLSSTEPNLQNIPIRLEEGRKIRQAFVPSKPDWVIFSADYSQIELRVLAHIANDENLIDAFRHDLDIHTKTAMDIFHVTADEVTPNMRRQAKAVNFGIVYGISDYGLSQNLNIPRKEAAEFIRRYFEIFPGVKQYMENIVQEAKQKGYVTTLLHRRRYLPDITSRNFNLRSFAERTAMNTPIQGSAADIIKKAMIDLADRLKREKLQARMLLQVHDELILEAPREEVERLQQIVPEVMENAIQLTVPLKVSYHYGPTWYDAK

SEQ ID NO: 41 - DNA, 1812 bp, synthetic construct
  misc_feature 1..1812: note = Variant of DNA polymerase
  source 1..1812: mol_type = other DNA
atgcatcaccatcaccatcacggtggcagcggtatggttgcaccacagaccaaaaaagaagaagccgtactgccgaacatcaattatacaattgtggaggaagtcagcgaaccgattctcgcggatcgttcggcgttagtggttgaggttctggaatccaactaccataaggctccgatcctgggctttgccctggccaatgaacacggtaacttcttcattcgcactgacacggctctttcttctccgctgtttaccgcgtggctggaggatgagagcaagaagaaatcagtattcgacggaaaacgcgcaatcgtggccctgaaatggaaaggcattgaattacgtggcatcgaatttgacttgttgatcgcttcatatctcctgaatccctcgcaaagcacggaagatgtcgcaagcgtggccaagaccaaacagtacatggcagtacagagtgatgaagcagtctatggaaaaggtgcgaaacaaacggtgccagatgaaaacgttttagccgaacatctggtgcgtaaagctgctgcaattcgcgccctggagaaagaactgatccacgatttgcaggaaaatgaacaatacgccctgtttactgaccttgaattacctctgtcctcgattctggcagagatggaatttaccggtgtgaaagtagatgttgaacgcctgaaagaaatgggcgaggagctcacagaacaactgcgcgcagtggagcaggaaatctataagttagctggccaagaattcaacattaacagccctaaacaactgggtgtcattctgtttgaaaaattacagcttcccgtcctgaagaagacgaagaccggctatagtacgagtgctgatgtgctcgagaaacttgccccgcagcatgaaatcgtcgagaaaattcttcactaccgtcagctcggtaaactgcaatccacatatattgaagggctgctgaaagttgtacatcgcgacacccataaagtccacaccatcttcaaccaggccctgactcaaaccgggcgcctgtcaagcaccgaacctaatctccagaacatcccaattcgtctggaagaaggccgcaaaattcgccaagcatttgtgccatcgaaacctgactgggttatctttagcgcagattactcacagattgagctccgtgttctcgcacacattgcaaacgatgaaaatctgatcgatgcttttcgtcatgaccttgacatccatacgaagacagccatggatattttccatgtaacagcagatgaagttacccccaatatgcgtcgccaagcaaaagccgtgaacttcggtattgtctatgggatctctgattacggtctgagtcagaaccttaatatcccacgcaaagaagccgcccggtttattcgtcgttatttcgaaatttttcccggcgttaaacagtacatggagaatattgtacaggaagccaaacagaaaggatacgtcaccacccttttacaccgccgccgctatctgccagacatcacctctcgtaatttcaacttacgttcattcgcagaacgcacggccatgaacaccccaattcaaggatcagccgccgacatcatcaagaaggcaatgattgatttagctgatcgtctgaaacgcgagaaacttcaagctcgtatgctgctccaggttcatgacgaactgattcttgaagctcctcgtgaggaagtcgaacgcctgcagcagattgtacccgaggtcatggagaacgccatccagttaaccgtcccactgaaagttgattatcactacggtcctacgtggtacgacgctaag

SEQ ID NO: 42 - protein, 604 aa, synthetic construct
  REGION 1..604: note = Variant of DNA polymerase
MHHHHHHGGSGMVAPQTKKEEAVLPNINYTIVEEVSEPILADRSALVVEVLESNYHKAPILGFALANEHGNFFIRTDTALSSPLFTAWLEDESKKKSVFDGKRAIVALKWKGIELRGIEFDLLIASYLLNPSQSTEDVASVAKTKQYMAVQSDEAVYGKGAKQTVPDENVLAEHLVRKAAAIRALEKELIHDLQENEQYALFTDLELPLSSILAEMEFTGVKVDVERLKEMGEELTEQLRAVEQEIYKLAGQEFNINSPKQLGVILFEKLQLPVLKKTKTGYSTSADVLEKLAPQHEIVEKILHYRQLGKLQSTYIEGLLKVVHRDTHKVHTIFNQALTQTGRLSSTEPNLQNIPIRLEEGRKIRQAFVPSKPDWVIFSADYSQIELRVLAHIANDENLIDAFRHDLDIHTKTAMDIFHVTADEVTPNMRRQAKAVNFGIVYGISDYGLSQNLNIPRKEAARFIRRYFEIFPGVKQYMENIVQEAKQKGYVTTLLHRRRYLPDITSRNFNLRSFAERTAMNTPIQGSAADIIKKAMIDLADRLKREKLQARMLLQVHDELILEAPREEVERLQQIVPEVMENAIQLTVPLKVDYHYGPTWYDAK

SEQ ID NO: 43 - DNA, 1812 bp, synthetic construct
  misc_feature 1..1812: note = Variant of DNA polymerase
  source 1..1812: mol_type = other DNA
atgcatcaccatcaccatcacggtggcagcggtatggttgcaccacagaccaaaaaagaagaagccgtactgccgaacatcaattatacaattgtggaggaagtcagcgaaccgattctcgcggatcgttcggcgttagtggttgaggttctggaatccaactaccataaggctccgatcctgggctttgccctggccaatgaacacggtaacttcttcattcgcactgacacggctctttcttctccgctgtttaccgcgtggctggaggatgagagcaagaagaaatcagtattcgacggaaaacgcgcaatcgtggccctgaaatggaaaggcattgaattacgtggcatcgaatttgacttgttgatcgcttcatatctcctgaatccctcgcaaagcacggaagatgtcgcaagcgtggccaagaccaaacagtacatggcagtacagagtgatgaagcagtctatggaaaaggtgcgaaacaaacggtgccagatgaaaacgttttagccgaacatctggtgcgtaaagctgctgcaattcgcgccctggagaaagaactgatccacgatttgcaggaaaatgaacaatacgccctgtttactgaccttgaattacctctgtcctcgattctggcagagatggaatttaccggtgtgaaagtagatgttgaacgcctgaaagaaatgggcgaggagctcacagaacaactgcgcgcagtggagcaggaaatctataagttagctggccaagaattcaacattaacagccctaaacaactgggtgtcattctgtttgaaaaattacagcttcccgtcctgaagaagacgaagaccggctatagtacgagtgctgatgtgctcgagaaacttgccccgcagcatgaaatcgtcgagaaaattcttcactaccgtcagctcggtaaactgcaatccacatatattgaagggctgctgaaagttgtacatcgcgacacccataaagtccacaccatcttcaaccaggccctgactcaaaccgggcgcctgtcaagcaccgaacctaatctccagaacatcccaattcgtctggaagaaggccgcaaaattcgccaagcatttgtgccatcgaaacctgactgggttatctttagcgcagattactcacagattgagctccgtgttctcgcacacattgcaaacgatgaaaatctgatcgatgcttttcgtcatgaccttgacatccatacgaagacagccatggatattttccatgtaacagcagatgaagttacccccaatatgcgtcgccaagcaaaagccgtgaacttcggtattgtctatgggatctctgattacggtctgagtcagaaccttaatatcccacgcaaagaagccgccgaatttattcgtcgttatttcgaaatttttcccggcgttaaacagtacatggagaatattgtacaggaagccaaacagaaaggatacgtcaccacccttttacaccgccgccgctatctgccagacatcacctctcgtaatttcaacttacgttcattcgcagaacgcacggccatgaacaccccaattcaaggatcagccgccgacatcatcaagaaggcaatgattgatttagctcgtcgtctgaaacgcgagaaacttcaagctcgtatgctgctccaggttcatgacgaactgattcttgaagctcctcgtgaggaagtcgaacgcctgcagcagattgtacccgaggtcatggagaacgccatccagttaaccgtcccactgaaagttgattatcactacggtcctacgtggtacgacgctaag

SEQ ID NO: 44 - protein, 604 aa, synthetic construct
  REGION 1..604: note = Variant of DNA polymerase
MHHHHHHGGSGMVAPQTKKEEAVLPNINYTIVEEVSEPILADRSALVVEVLESNYHKAPILGFALANEHGNFFIRTDTALSSPLFTAWLEDESKKKSVFDGKRAIVALKWKGIELRGIEFDLLIASYLLNPSQSTEDVASVAKTKQYMAVQSDEAVYGKGAKQTVPDENVLAEHLVRKAAAIRALEKELIHDLQENEQYALFTDLELPLSSILAEMEFTGVKVDVERLKEMGEELTEQLRAVEQEIYKLAGQEFNINSPKQLGVILFEKLQLPVLKKTKTGYSTSADVLEKLAPQHEIVEKILHYRQLGKLQSTYIEGLLKVVHRDTHKVHTIFNQALTQTGRLSSTEPNLQNIPIRLEEGRKIRQAFVPSKPDWVIFSADYSQIELRVLAHIANDENLIDAFRHDLDIHTKTAMDIFHVTADEVTPNMRRQAKAVNFGIVYGISDYGLSQNLNIPRKEAAEFIRRYFEIFPGVKQYMENIVQEAKQKGYVTTLLHRRRYLPDITSRNFNLRSFAERTAMNTPIQGSAADIIKKAMIDLARRLKREKLQARMLLQVHDELILEAPREEVERLQQIVPEVMENAIQLTVPLKVDYHYGPTWYDAK

SEQ ID NO: 45 - DNA, 1812 bp, synthetic construct
  misc_feature 1..1812: note = Variant of DNA polymerase
  source 1..1812: mol_type = other DNA
atgcatcaccatcaccatcacggtggcagcggtatggttgcaccacagaccaaaaaagaaatggccgtactgccgaacatcaattatacaattgtggaggaagtcagcgaaccgattctcgcggatcgttcggcgttagtggttgaggttctggaatccaactaccataaggctccgatcctgggctttgccctggccaatgaacacggtaacttcttcattcgcactgacacggctctttcttctccgctgtttaccgcgtggctggaggatgagagcaagaagaaatcagtattcgacggaaaacgcgcaatcgtggccctgaaatggaaaggcattgaattacgtggcatcgaatttgacttgttgatcgcttcatatctcctgaatccctcgcaaagcacggaagatgtcgcaagcgtggccaagaccaaacagtacatggcagtacagagtgatgaagcagtctatggaaaaggtgcgaaacaaacggtgccagatgaaaacgttttagccgaacatctggtgcgtaaagctgctgcaattcgcgccctggagaaagaactgatccacgatttgcaggaaaatgaacaatacgccctgtttactgaccttgaattacctctgtcctcgattctggcagagatggaatttaccggtgtgaaagtagatgttgaacgcctgaaagaaatgggcgaggagctcacagaacaactgcgcgcagtggagcaggaaatctataagttagctggccaagaattcaacattaacagccctaaacaactgggtgtcattctgtttgaaaaattacagcttcccgtcctgaagaagacgaagaccggctatagtacgagtgctgatgtgctcgagaaacttgccccgcagcatgaaatcgtcgagaaaattcttcactaccgtcagctcggtaaactgcaatccacatatattgaagggctgctgaaagttgtacatcgcgacacccataaagtccacaccatcttcaaccaggccctgactcaaaccgggcgcctgtcaagcaccgaacctaatctccagaacatcccaattcgtctggaagaaggccgcaaaattcgccaagcatttgtgccatcgaaacctgactgggttatctttagcgcagattactcacagattgagctccgtgttctcgcacacattgcaaacgatgaaaatctgatcgatgcttttcgtcatgaccttgacatccatacgaagacagccatggatattttccatgtaacagcagatgaagttacccccaatatgcgtcgccaagcaaaagccgtgaacttcggtattgtctatgggatctctgattacggtctgagtcagaaccttaatatcccacgcaaagaagccgccgaatttattcgtcgttatttcgaaatttttcccggcgttaaacagtacatggagaatattgtacaggaagccaaacagaaaggatacgtcaccacccttttacaccgccgccgctatctgccagacatcacctctcgtaatttcaacttacgttcattcgcagaacgcacggccatgaacaccccaattcaaggatcagccgccgacatcatcaagaaggcaatgattgatttagctgatcgtctgaaacgcgagaaacttcaagctcgtatgctgctccaggttcatgacgaactgattcttgaagctcctcgtgaggaagtcgaacgcctgcagcagattgtacccgaggtcatggagaacgccatccagttaaccgtcccactgaaagttgattatcactacggtcctacgtggtacgacgctaag

SEQ ID NO: 46 - protein, 604 aa, synthetic construct
  REGION 1..604: note = Variant of DNA polymerase
MHHHHHHGGSGMVAPQTKKEMAVLPNINYTIVEEVSEPILADRSALVVEVLESNYHKAPILGFALANEHGNFFIRTDTALSSPLFTAWLEDESKKKSVFDGKRAIVALKWKGIELRGIEFDLLIASYLLNPSQSTEDVASVAKTKQYMAVQSDEAVYGKGAKQTVPDENVLAEHLVRKAAAIRALEKELIHDLQENEQYALFTDLELPLSSILAEMEFTGVKVDVERLKEMGEELTEQLRAVEQEIYKLAGQEFNINSPKQLGVILFEKLQLPVLKKTKTGYSTSADVLEKLAPQHEIVEKILHYRQLGKLQSTYIEGLLKVVHRDTHKVHTIFNQALTQTGRLSSTEPNLQNIPIRLEEGRKIRQAFVPSKPDWVIFSADYSQIELRVLAHIANDENLIDAFRHDLDIHTKTAMDIFHVTADEVTPNMRRQAKAVNFGIVYGISDYGLSQNLNIPRKEAAEFIRRYFEIFPGVKQYMENIVQEAKQKGYVTTLLHRRRYLPDITSRNFNLRSFAERTAMNTPIQGSAADIIKKAMIDLADRLKREKLQARMLLQVHDELILEAPREEVERLQQIVPEVMENAIQLTVPLKVDYHYGPTWYDAK

SEQ ID NO: 47 - DNA, 1812 bp, synthetic construct
  misc_feature 1..1812: note = Variant of DNA polymerase
  source 1..1812: mol_type = other DNA
atgcatcaccatcaccatcacggtggcagcggtatggttgcaccacagaccaaaaaagaagaagccgtactgccgaacatcaattatacaattgtggaggaagtcagcgaaccgattctcgcggatcgttcggcgttagtggttgaggttctggaatccaactaccataaggctccgatcctgggctttgccctggccaatgaacacggtaacttcttcattcgcactgacacggctctttcttctccgctgtttaccgcgtggctggaggatgagagcaagaagaaatcagtattcgacggaaaacgcgcaatcgtggccctgaaatggaaaggcattgaattacgtggcatcgaatttgacttgttgatcgcttcatatctcctgaatccctcgcaaagcacggaagatgtcgcaagcgtggccaagaccaaacagtacatggcagtacagagtgatgaagcagtctatggaaaaggtgcgaaacaaacggtgccagatgaaaacgttttagccgaacatctggtgcgtaaagctgctgcaattcgcgccctggagaaagaactgatccacgatttgcaggaaaatgaacaatacgccctgtttactgaccttgaattacctctgtcctcgattctggcagagatggaatttaccggtgtgaaagtagatgttgaacgcctgaaagaaatgggcgaggagctcacagaacaactgcgcgcagtggagcaggaaatctataagttagctggccaagaattcaacattaacagccctaaacaactgggtgtcattctgtttgaaaaattacagcttcccgtcctgaagaagacgaagaccggctatagtacgagtgctgatgtgctcgagaaacttgccccgcagcatgaaatcgtcgagaaaattcttcactaccgtcagctcggtaaactgcaatccacatatattgaagggctgctgaaagttgtacatcgcgacacccataaagtccacaccatcttcaaccaggccctgactcaaaccgggcgcctgtcaagcaccgaacctaatctccagaacatcccaattcgtctggaagaaggccgcaaaattcgccaagcatttgtgccatcgaaacctgactgggttatctttagcgcagattactcacagattgagctccgtgttctcgcacacattgcaaacgatgaaaatctgatcgatgcttttcgtcatgaccttgacatccatacgaagacagccatggatattttccatgtaacagcagatgaagttacccccaatatgcgtcgccaagcaaaagccgtgaacttcggtattgtctatgggatctctgattacggtctgagtcagaaccttaatatcccacgcaaagaagccgccgaatttattcgtcgttatttcgaaatttttcccggcgttaaacagtacatggagaatattgtacaggaagccaaacagaaaggatacgtcaccacccttttacaccgccgccgctatctgccagacatcacctctcgtaatttcaacttacgttcattcgcagaacgcacggccatgaacaccccaattcaaggatcagccgccgacatcatcaagaaggcaatgattgatttagctgatcgtctgaaacgcgagaaacttcaagctcgtatgctgctccaggttcatgacgaactgattcttgaagctcctcgtgaggaagtcgaacgcctggtgcagattgtacccgaggtcatggagaacgccatccagttaaccgtcccactgaaagttgattatcactacggtcctacgtggtacgacgctaag

SEQ ID NO: 48 - protein, 604 aa, synthetic construct
  REGION 1..604: note = Variant of DNA polymerase
MHHHHHHGGSGMVAPQTKKEEAVLPNINYTIVEEVSEPILADRSALVVEVLESNYHKAPILGFALANEHGNFFIRTDTALSSPLFTAWLEDESKKKSVFDGKRAIVALKWKGIELRGIEFDLLIASYLLNPSQSTEDVASVAKTKQYMAVQSDEAVYGKGAKQTVPDENVLAEHLVRKAAAIRALEKELIHDLQENEQYALFTDLELPLSSILAEMEFTGVKVDVERLKEMGEELTEQLRAVEQEIYKLAGQEFNINSPKQLGVILFEKLQLPVLKKTKTGYSTSADVLEKLAPQHEIVEKILHYRQLGKLQSTYIEGLLKVVHRDTHKVHTIFNQALTQTGRLSSTEPNLQNIPIRLEEGRKIRQAFVPSKPDWVIFSADYSQIELRVLAHIANDENLIDAFRHDLDIHTKTAMDIFHVTADEVTPNMRRQAKAVNFGIVYGISDYGLSQNLNIPRKEAAEFIRRYFEIFPGVKQYMENIVQEAKQKGYVTTLLHRRRYLPDITSRNFNLRSFAERTAMNTPIQGSAADIIKKAMIDLADRLKREKLQARMLLQVHDELILEAPREEVERLVQIVPEVMENAIQLTVPLKVDYHYGPTWYDAK

SEQ ID NO: 49 - DNA, 1812 bp, synthetic construct
  misc_feature 1..1812: note = Variant of DNA polymerase
  source 1..1812: mol_type = other DNA
atgcatcaccatcaccatcacggtggcagcggtatggttgcaccacagaccaaaaaagaagaagccgtactgccgaacatcaattatacaattgtggaggaagtcagcgaaccgattctcgcggatcgttcggcgttagtggttgaggttctggaatccaactaccataaggctccgatcctgggctttgccctggccaatgaacacggtaacttcttcattcgcactgacacggctctttcttctccgctgtttaccgcgtggctggaggatgagagcaagaagaaatcagtattcgacggaaaacgcgcaatcgtggccctgaaatggaaaggcattgaattacgtggcatcgaatttgacttgttgatcgcttcatatctcctgaatccctcgcaaagcacggaagatgtcgcaagcgtggccaagaccaaacagtacatggcagtacagagtgatgaagcagtctatggaaaaggtgcgaaacaaacggtgccagatgaaaacgttttagccgaacatctggtgcgtaaagctgctgcaattcgcgccctggagaaagaactgatccacgatttgcaggaaaatgaacaatacgccctgtttactgaccttgaattacctctgtcctcgattctggcagagatggaatttaccggtgtgaaagtagatgttgaacgcctgaaagaaatgggcgaggagctcacagaacaactgcgcgcagtggagcaggaaatctataagttagctggccaagaattcaacattaacagccctaaacaactgggtgtcattctgtttgaaaaattacagcttcccgtcctgaagaagacgaagaccggctatagtacgagtgctgatgtgctcgagaaacttgccccgcagcatgaaatcgtcgagaaaattcttcactaccgtcagctcggtaaactgcaatccacatatattgaagggctgctgaaagttgtacatcgcgacacccataaagtccacaccatcttcaaccaggccctgactcaaaccgggcgcctgtcaagcaccgaacctaatctccagaacatcccaattcgtctggaagaaggccgcaaaattcgccaagcatttgtgccatcgaaacctgactgggttatctttagcgcagattactcacagattgagctccgtgttctcgcacacattgcaaacgatgaaaatctgatcgatgcttttcgtcatgaccttgacatccatacgaagacagccatggatattttccatgtaacagcagatgaagttacccccaatatgcgtcgccaagcaaaagccgtgaacttcggtattgtctatgggatctctgattacggtctgagtcagaaccttaatatcccacgcaaagaagccgccgaatttattcgtcgttatttcgaaatttttcccggcgttaaacagtacatggagaatattgtacaggaagccaaacagaaaggatacgtcaccacccttttacaccgccgccgctatctgccagacatccattctcgtaatttcaacttacgttcattcgcagaacgcacggccatgaacaccccaattcaaggatcagccgccgacatcatcaagaaggcaatgattgatttagctgatcgtctgaaacgcgagaaacttcaagctcgtatgctgctccaggttcatgacgaactgattcttgaagctcctcgtgaggaagtcgaacgcctgcagcagattgtacccgaggtcatggagaacgccatccagttaaccgtcccactgaaagttgattatcactacggtcctacgtggtacgacgctaag

SEQ ID NO: 50 - protein, 604 aa, synthetic construct
  REGION 1..604: note = Variant of DNA polymerase
MHHHHHHGGSGMVAPQTKKEEAVLPNINYTIVEEVSEPILADRSALVVEVLESNYHKAPILGFALANEHGNFFIRTDTALSSPLFTAWLEDESKKKSVFDGKRAIVALKWKGIELRGIEFDLLIASYLLNPSQSTEDVASVAKTKQYMAVQSDEAVYGKGAKQTVPDENVLAEHLVRKAAAIRALEKELIHDLQENEQYALFTDLELPLSSILAEMEFTGVKVDVERLKEMGEELTEQLRAVEQEIYKLAGQEFNINSPKQLGVILFEKLQLPVLKKTKTGYSTSADVLEKLAPQHEIVEKILHYRQLGKLQSTYIEGLLKVVHRDTHKVHTIFNQALTQTGRLSSTEPNLQNIPIRLEEGRKIRQAFVPSKPDWVIFSADYSQIELRVLAHIANDENLIDAFRHDLDIHTKTAMDIFHVTADEVTPNMRRQAKAVNFGIVYGISDYGLSQNLNIPRKEAAEFIRRYFEIFPGVKQYMENIVQEAKQKGYVTTLLHRRRYLPDIHSRNFNLRSFAERTAMNTPIQGSAADIIKKAMIDLADRLKREKLQARMLLQVHDELILEAPREEVERLQQIVPEVMENAIQLTVPLKVDYHYGPTWYDAK

SEQ ID NO: 51 - DNA, 1812 bp, synthetic construct
  misc_feature 1..1812: note = Variant of DNA polymerase
  source 1..1812: mol_type = other DNA
atgcatcaccatcaccatcacggtggcagcggtatggttgcaccacagaccaaaaaagaagaagccgtactgccgaacatcaattatacaattgtggaggaagtcagcgaaccgattctcgcggatcgttcggcgttagtggttgaggttctggaatccaactaccataaggctccgatcctgggctttgccctggccaatgaacacggtaacttcttcattcgcactgacacggctctttcttctccgctgtttaccgcgtggctggaggatgagagcaagaagaaatcagtattcgacggaaaacgcgcaatcgtggccctgaaatggaaaggcattgaattacgtggcatcgaatttgacttgttgatcgcttcatatctcctgaatccctcgcaaagcacggaagatgtcgcaagcgtggccaagaccaaacagtacatggcagtacagagggatgaagcagtctatggaaaaggtgcgaaacaaacggtgccagatgaaaacgttttagccgaacatctggtgcgtaaagctgctgcaattcgcgccctggagaaagaactgatccacgatttgcaggaaaatgaacaatacgccctgtttactgaccttgaattacctctgtcctcgattctggcagagatggaatttaccggtgtgaaagtagatgttgaacgcctgaaagaaatgggcgaggagctcacagaacaactgcgcgcagtggagcaggaaatctataagttagctggccaagaattcaacattaacagccctaaacaactgggtgtcattctgtttgaaaaattacagcttcccgtcctgaagaagacgaagaccggctatagtacgagtgctgatgtgctcgagaaacttgccccgcagcatgaaatcgtcgagaaaattcttcactaccgtcagctcggtaaactgcaatccacatatattgaagggctgctgaaagttgtacatcgcgacacccataaagtccacaccatcttcaaccaggccctgactcaaaccgggcgcctgtcaagcaccgaacctaatctccagaacatcccaattcgtctggaagaaggccgcaaaattcgccaagcatttgtgccatcgaaacctgactgggttatctttagcgcagattactcacagattgagctccgtgttctcgcacacattgcaaacgatgaaaatctgatcgatgcttttcgtcatgaccttgacatccatacgaagacagccatggatattttccatgtaacagcagatgaagttacccccaatatgcgtcgccaagcaaaagccgtgaacttcggtattgtctatgggatctctgattacggtctgagtcagaaccttaatatcccacgcaaagaagccgccgaatttattcgtcgttatttcgaaatttttcccggcgttaaacagtacatggagaatattgtacaggaagccaaacagaaaggatacgtcaccacccttttacaccgccgccgctatctgccagacatcacctctcgtaatttcaacttacgttcattcgcagaacgcacggccatgaacaccccaattcaaggatcagccgccgacatcatcaagaaggcaatgattgatttagctgatcgtctgaaacgcgagaaacttcaagctcgtatgctgctccaggttcatgacgaactgattcttgaagctcctcgtgaggaagtcgaacgcctgcagcagattgtacccgaggtcatggagaacgccatccagttaaccgtcccactgaaagttgattatcactacggtcctacgtggtacgacgctaag

SEQ ID NO: 52 - protein, 604 aa, synthetic construct
  REGION 1..604: note = Variant of DNA polymerase
MHHHHHHGGSGMVAPQTKKEEAVLPNINYTIVEEVSEPILADRSALVVEVLESNYHKAPILGFALANEHGNFFIRTDTALSSPLFTAWLEDESKKKSVFDGKRAIVALKWKGIELRGIEFDLLIASYLLNPSQSTEDVASVAKTKQYMAVQRDEAVYGKGAKQTVPDENVLAEHLVRKAAAIRALEKELIHDLQENEQYALFTDLELPLSSILAEMEFTGVKVDVERLKEMGEELTEQLRAVEQEIYKLAGQEFNINSPKQLGVILFEKLQLPVLKKTKTGYSTSADVLEKLAPQHEIVEKILHYRQLGKLQSTYIEGLLKVVHRDTHKVHTIFNQALTQTGRLSSTEPNLQNIPIRLEEGRKIRQAFVPSKPDWVIFSADYSQIELRVLAHIANDENLIDAFRHDLDIHTKTAMDIFHVTADEVTPNMRRQAKAVNFGIVYGISDYGLSQNLNIPRKEAAEFIRRYFEIFPGVKQYMENIVQEAKQKGYVTTLLHRRRYLPDITSRNFNLRSFAERTAMNTPIQGSAADIIKKAMIDLADRLKREKLQARMLLQVHDELILEAPREEVERLQQIVPEVMENAIQLTVPLKVDYHYGPTWYDAK

SEQ ID NO: 53 - DNA, 1812 bp, synthetic construct
  misc_feature 1..1812: note = Variant of DNA polymerase
  source 1..1812: mol_type = other DNA
atgcatcaccatcaccatcacggtggcagcggtatggttgcaccacagaccaaaaaagaagaagccgtactgccgaacatcaattatacaattgtggaggaagtcagcgaaccgattctcgcggatcgttcggcgttagtggttgaggttctggaatccaactaccataaggctccgatcctgggctttgccctggccaatgaacacggtaacttcttcattcgcactgacacggctctttcttctccgctgtttaccgcgtggctggaggatgagagcaagaagaaatcagtattcgacggaaaacgcgcaatcgtggccctgaaatggaaaggcattgaattacgtggcatcgaatttgacttgttgatcgcttcatatctcctgaatccctcgcaaagcacggaagatgtcgcaagcgtggccaagaccaaacagtacatggcagtacagagtgatgaagcagtctatggaaaaggtgcgaaacaaacggtgccagatgaaaacgttttagccgaacatctggtgcgtaaagctgctgcaattcgcgccctggagaaagaactgatccacgatttgcaggaaaatgaacaatacgccctgtttactgaccttgaattacctctgtcctcgattctggcagagatggaatttaccggtgtgaaagtagatgttgaacgcctgaaagaaatgggcgaggagctcacagaacaactgcgcgcagtggagcaggaaatctataagttagctggccaagaattcaacattaacagccctaaacaactgggtgtcattctgtttgaaaaattacagcttcccgtcctgaagaagacgaagaccggctatagtacgagtgctgatgtgctcgagaaacttgcccgtcagcatgaaatcgtcgagaaaattcttcactaccgtcagctcggtaaactgcaatccacatatattgaagggctgctgaaagttgtacatcgcgacacccataaagtccacaccatcttcaaccaggccctgactcaaaccgggcgcctgtcaagcaccgaacctaatctccagaacatcccaattcgtctggaagaaggccgcaaaattcgccaagcatttgtgccatcgaaacctgactgggttatctttagcgcagattactcacagattgagctccgtgttctcgcacacattgcaaacgatgaaaatctgatcgatgcttttcgtcatgaccttgacatccatacgaagacagccatggatattttccatgtaacagcagatgaagttacccccaatatgcgtcgccaagcaaaagccgtgaacttcggtattgtctatgggatctctgattacggtctgagtcagaaccttaatatcccacgcaaagaagccgccgaatttattcgtcgttatttcgaaatttttcccggcgttaaacagtacatggagaatattgtacaggaagccaaacagaaaggatacgtcaccacccttttacaccgccgccgctatctgccagacatcacctctcgtaatttcaacttacgttcattcgcagaacgcacggccatgaacaccccaattcaaggatcagccgccgacatcatcaagaaggcaatgattgatttagctgatcgtctgaaacgcgagaaacttcaagctcgtatgctgctccaggttcatgacgaactgattcttgaagctcctcgtgaggaagtcgaacgcctgcagcagattgtacccgaggtcatggagaacgccatccagttaaccgtcccactgaaagttgattatcactacggtcctacgtggtacgacgctaag

SEQ ID NO: 54 - protein, 604 aa, synthetic construct
  REGION 1..604: note = Variant of DNA polymerase
MHHHHHHGGSGMVAPQTKKEEAVLPNINYTIVEEVSEPILADRSALVVEVLESNYHKAPILGFALANEHGNFFIRTDTALSSPLFTAWLEDESKKKSVFDGKRAIVALKWKGIELRGIEFDLLIASYLLNPSQSTEDVASVAKTKQYMAVQSDEAVYGKGAKQTVPDENVLAEHLVRKAAAIRALEKELIHDLQENEQYALFTDLELPLSSILAEMEFTGVKVDVERLKEMGEELTEQLRAVEQEIYKLAGQEFNINSPKQLGVILFEKLQLPVLKKTKTGYSTSADVLEKLARQHEIVEKILHYRQLGKLQSTYIEGLLKVVHRDTHKVHTIFNQALTQTGRLSSTEPNLQNIPIRLEEGRKIRQAFVPSKPDWVIFSADYSQIELRVLAHIANDENLIDAFRHDLDIHTKTAMDIFHVTADEVTPNMRRQAKAVNFGIVYGISDYGLSQNLNIPRKEAAEFIRRYFEIFPGVKQYMENIVQEAKQKGYVTTLLHRRRYLPDITSRNFNLRSFAERTAMNTPIQGSAADIIKKAMIDLADRLKREKLQARMLLQVHDELILEAPREEVERLQQIVPEVMENAIQLTVPLKVDYHYGPTWYDAK

SEQ ID NO: 55 - DNA, 1812 bp, synthetic construct
  misc_feature 1..1812: note = Variant of DNA polymerase
  source 1..1812: mol_type = other DNA
atgcatcaccatcaccatcacggtggcagcggtatggttgcaccacagaccaaaaaagaagaagccgtactgccgaacatcaattatacaattgtggaggaagtcagcgaaccgattctcgcggatcgttcggcgttagtggttgaggttctggaatccaactaccataaggctccgatcctgggctttgccctggccaatgaacacggtaacttcttcattcgcactgacacggctctttcttctccgctgtttaccgcgtggctggaggatgagagcaagaagaaatcagtattcgacggaaaacgcgcaatcgtggccctgaaatggaaaggcattgaattacgtggcatcgaatttgacttgttgatcgcttcatatctcctgaatccctcgcaaagcacggaagatgtcgcaagcgtggccaagaccaaacagtacatggcagtacagagtgatgaagcagtctatggaaaaggtgcgaaacaaacggtgccagatgaaaacgttttagccgaacatctggtgcgtaaagctgctgcaattcgcgccctggagaaagaactgatccacgatttgcaggaaaatgaacaatacgccctgtttactgaccttgaattacctctgtcctcgattctggcagagatggaatttaccggtgtgaaagtagatgttgaacgcctgaaagaaatgggcgaggagctcacagaacaactgcgcgcagtggagcaggaaatctataagttagctggccaagaattcaacattaacagccctaaacaactgggtgtcattctgtttgaaaaattacagcttcccgtcctgaagaagacgaagaccggctatagtacgagtgctgatgtgctcgagaaacttgccccgcagcatgaaatcgtcgagaaaattcttcactaccgtcagctcggtaaactgcaatccacatatattgaagggctgctgaaagttgtacatcgcgacacccataaagtccacaccatcttcaaccaggccctgactcaaaccgggcgcctgtcaagcaccgaacctaatctccagaacatcccaattcgtctggaagaaggccgcaaaattcgccaagcatttgtgccatcgaaacctgactgggttatctttagcgcagattactcacagattgagctccgtgttctcgcacacattgcaaacgatgaaaatctgatcgatgcttttcgtcatgaccttgacatccatacgaagacagccatggatattttccatgtaacagcagatgaagttacccccaatatgcgtcgccaagcaaaagccgtgaacttcggtattgtctatgggatctctgattacggtctgagtcagaaccttaatatcccacgcaaagaagccgccgaatttattcgtcgttatttcgaaatttttcccggcgttaaacagtacatggagaatattgtacaggaagccaaacagaaaggatacgtcaccacccttttacaccgccgccgctatctgccagacatcacctctcgtaatttcaacttacgttcattcgcagaacgcacggccatgaacaccccaattcaaggatcagccgccgacatcatcaagaaggcaatgattgatttagctgatcgtctgaaaaaggagaaacttcaagctcgtatgctgctccaggttcatgacgaactgattcttgaagctcctcgtgaggaagtcgaacgcctgcagcagattgtacccgaggtcatggagaacgccatccagttaaccgtcccactgaaagttgattatcactacggtcctacgtggtacgacgctaag

SEQ ID NO: 56 - protein, 604 aa, synthetic construct
  REGION 1..604: note = Variant of DNA polymerase
MHHHHHHGGSGMVAPQTKKEEAVLPNINYTIVEEVSEPILADRSALVVEVLESNYHKAPILGFALANEHGNFFIRTDTALSSPLFTAWLEDESKKKSVFDGKRAIVALKWKGIELRGIEFDLLIASYLLNPSQSTEDVASVAKTKQYMAVQSDEAVYGKGAKQTVPDENVLAEHLVRKAAAIRALEKELIHDLQENEQYALFTDLELPLSSILAEMEFTGVKVDVERLKEMGEELTEQLRAVEQEIYKLAGQEFNINSPKQLGVILFEKLQLPVLKKTKTGYSTSADVLEKLAPQHEIVEKILHYRQLGKLQSTYIEGLLKVVHRDTHKVHTIFNQALTQTGRLSSTEPNLQNIPIRLEEGRKIRQAFVPSKPDWVIFSADYSQIELRVLAHIANDENLIDAFRHDLDIHTKTAMDIFHVTADEVTPNMRRQAKAVNFGIVYGISDYGLSQNLNIPRKEAAEFIRRYFEIFPGVKQYMENIVQEAKQKGYVTTLLHRRRYLPDITSRNFNLRSFAERTAMNTPIQGSAADIIKKAMIDLADRLKKEKLQARMLLQVHDELILEAPREEVERLQQIVPEVMENAIQLTVPLKVDYHYGPTWYDAK

SEQ ID NO: 57 - DNA, 1812 bp, synthetic construct
  misc_feature 1..1812: note = Variant of DNA polymerase
  source 1..1812: mol_type = other DNA
atgcatcaccatcaccatcacggtggcagcggtatggttgcaccacagaccaaaaaagaagaagccgtactgccgaacatcaattatacaattgtggaggaagtcagcgaaccgattctcgcggatcgttcggcgttagtggttgaggttctggaatccaactaccataaggctccgatcctgggctttgccctggccaatgaacacggtaacttcttcattcgcactgacacggctctttcttctccgctgtttaccgcgtggctggaggatgagagcaagaagaaatcagtattcgacgctaaacgcgcaatcgtggccctgaaatggaaaggcattgaattacgtggcatcgaatttgacttgttgatcgcttcatatctcctgaatccctcgcaaagcacggaagatgtcgcaagcgtggccaagaccaaacagtacatggcagtacagagtgatgaagcagtctatggaaaaggtgcgaaacaaacggtgccagatgaaaacgttttagccgaacatctggtgcgtaaagctgctgcaattcgcgccctggagaaagaactgatccacgacttgcaggaaaatgaacaatacgccctgtttactgaccttgaattacctctgtcctcgattctggcagagatggaatttaccggtgtgaaagtagatgttgaacgcctgaaagaaatgggcgaggagctcacagaacaactgcgccaagtggagcaggaaatctataagttagctggccaagaattcaacattaacagccctaaacaactgggtgtcattctgtttgaaaaattacagcttcccgtcctgaagaagacgaagaccggctatagtacgagtgctgatgtgctcgagaaacttgccccgcagcatgaaatcgtcgagaaaattcttcactaccgtcagctcggtaaactgcaatccacatatattgaagggctgctgaaagttgtacatcgcgacacccataaagtccacaccatcttcaaccaggccctgactcaaaccgggcgcctgtcaagcaccgaacctaatctccagaacatcccaattcgtctggaagaaggccgcaaaattcgccaagcatttgtgccatcgaaacctgactgggttatctttagcgcagattactcacagattgagctccgtgttctcgcacacattgcaaacgatgaaaatctgatcgatgcttttcgtcatgaccttgacatccatacgaagacagccatggatattttccatgtaacagcagatgaagttaccccgaatatgcgtcgccaagcaaaagccgtgaacttcggtattgtctatgggatctctgattacggtctgagtcagaaccttaatatcccacgcaaagaagccgccgaatttattcgtcgttatttcgaaagctttcccggcgttaaacagtacatggagaatattgtacaggaagccaaacagaaaggatacgtcaccacccttttacaccgccgccgctatctgccagacatcacctctcgtaatttcaacttacgttcattcgcagaacgcacggccatgaacaccccaattcaaggatcagccgccgacatcatcaagaaggcaatgattgatttagctgatcgtctgaaacgcgagaaacttcaagctcgtatgctgctccaggttcatgacgaactgattcttgaagctcctcgtgaggaagtcgaacgcctgcagcagattgtacccgaggtcatggagaacgccatccagttaaccgtcccactgaaagttgattatcactacggtcctacgtggtacgacgctaag

SEQ ID NO: 58 - protein, 604 aa, synthetic construct
  REGION 1..604: note = Variant of DNA polymerase
MHHHHHHGGSGMVAPQTKKEEAVLPNINYTIVEEVSEPILADRSALVVEVLESNYHKAPILGFALANEHGNFFIRTDTALSSPLFTAWLEDESKKKSVFDAKRAIVALKWKGIELRGIEFDLLIASYLLNPSQSTEDVASVAKTKQYMAVQSDEAVYGKGAKQTVPDENVLAEHLVRKAAAIRALEKELIHDLQENEQYALFTDLELPLSSILAEMEFTGVKVDVERLKEMGEELTEQLRQVEQEIYKLAGQEFNINSPKQLGVILFEKLQLPVLKKTKTGYSTSADVLEKLAPQHEIVEKILHYRQLGKLQSTYIEGLLKVVHRDTHKVHTIFNQALTQTGRLSSTEPNLQNIPIRLEEGRKIRQAFVPSKPDWVIFSADYSQIELRVLAHIANDENLIDAFRHDLDIHTKTAMDIFHVTADEVTPNMRRQAKAVNFGIVYGISDYGLSQNLNIPRKEAAEFIRRYFESFPGVKQYMENIVQEAKQKGYVTTLLHRRRYLPDITSRNFNLRSFAERTAMNTPIQGSAADIIKKAMIDLADRLKREKLQARMLLQVHDELILEAPREEVERLQQIVPEVMENAIQLTVPLKVDYHYGPTWYDAK

SEQ ID NO: 59 - DNA, 1812 bp, synthetic construct
  misc_feature 1..1812: note = Variant of DNA polymerase
  source 1..1812: mol_type = other DNA
atgcatcaccatcaccatcacggtggcagcggtatggttgcaccacagaccaaaaaagaagaagccgtactgccgaacatcaattatacaattgtggaggaagtcagcgaaccgattctcgcggatcgttcggcgttagtggttgaggttctggaatccaactaccataaggctccgatcctgggctttgccctggccaatgaacacggtaacttcttcattcgcactgacacggctctttcttctccgctgtttaccgcgtggctggaggatgagagcaagaagaaatcagtattcgacggaaaacgcgcaatcgtggccctgaaatggaaaggcattgaattacgtggcatcgaatttgacttgttgatcgcttcatatctcctgaatccctcgcaaagcacggaagatgtcgcaagcgtggccaagaccaaacagtacatggcagtacagagtgatgaagcagtctatggaaaaggtgcgaaacaaacggtgccagatgaaaacgttttagccgaacatctggtgcgtaaagctgctgcaattcgcgccctggagaaagaactgatccacgatttgcaggaaaatgaacaatacgccctgtttactgaccttgaattacctctgtcctcgattctggcagagatggaatttaccggtgtgaaagtagatgttgaacgcctgaaagaaatgggcgaggagctcacagaacaactgcgcgcagtggagcaggaaatctataagttagctggccaagaattcaacattaacagccctaaacaactgggtgtcattctgtttgaaaaattacagcttcccgtcctgaagaagacgaagaccggctatagtacgagtgctgatgtgctcgagaaacttgccccgcagcatgaaatcgtcgagaaaattcttcactaccgtcagctcggtaaactgcaatccacatatattgaagggctgctgaaagttgtacatcgcgacacccataaagtccacaccatcttcaaccaggccctgactcaaaccgggcgcctgtcaagcaccgaacctaatctccagaacatcccaattcgtctggaagaaggccgcaaaattcgccaagcatttgtgccatcgaaacctgactgggttatctttagcgcagattactcacagattgagctccgtgttctcgcacacattgcaaacgatgaaaatctgatcgatgcttttcgtcatgaccttgacatccatacgaagacagccatggatattttccatgtaacagcagatgaagttacccccaatatgcgtcgccaagcaaaagccgtgaacttcggtattgtctatgggatctctgattacggtctgagtcagaaccttaatatcccacgcaaagaagccgccgaatttattcgtcgttatttcgaaatttttcccggcgttaaacagtacatggagaatattgtacaggaagccaaacagaaaggatacgtcaccacccttttacaccgccgccgctatctgccagacatcacctctcgtaatttcaacttacgttcattcgcagaacgcacggccatgaacaccccaattcaaggatcagccgccgacatcatcaagaaggcaatgattgatttagctgatcgtctgaaacgcgagaaacttcaagctcgtatgctgctccaggttcatgacgaactgattcttgaagctcctcgtgaggaagtcgaacgcctgcagcagattgtacccgaggtcatggagaacgccgtgcagttaaccgtcccactgaaagttgattatcactacggtcctacgtggtacgacgctaag

SEQ ID NO: 60 - protein, 604 aa, synthetic construct
  REGION 1..604: note = Variant of DNA polymerase
MHHHHHHGGSGMVAPQTKKEEAVLPNINYTIVEEVSEPILADRSALVVEVLESNYHKAPILGFALANEHGNFFIRTDTALSSPLFTAWLEDESKKKSVFDGKRAIVALKWKGIELRGIEFDLLIASYLLNPSQSTEDVASVAKTKQYMAVQSDEAVYGKGAKQTVPDENVLAEHLVRKAAAIRALEKELIHDLQENEQYALFTDLELPLSSILAEMEFTGVKVDVERLKEMGEELTEQLRAVEQEIYKLAGQEFNINSPKQLGVILFEKLQLPVLKKTKTGYSTSADVLEKLAPQHEIVEKILHYRQLGKLQSTYIEGLLKVVHRDTHKVHTIFNQALTQTGRLSSTEPNLQNIPIRLEEGRKIRQAFVPSKPDWVIFSADYSQIELRVLAHIANDENLIDAFRHDLDIHTKTAMDIFHVTADEVTPNMRRQAKAVNFGIVYGISDYGLSQNLNIPRKEAAEFIRRYFEIFPGVKQYMENIVQEAKQKGYVTTLLHRRRYLPDITSRNFNLRSFAERTAMNTPIQGSAADIIKKAMIDLADRLKREKLQARMLLQVHDELILEAPREEVERLQQIVPEVMENAVQLTVPLKVDYHYGPTWYDAK

SEQ ID NO: 61 - DNA, 1812 bp, synthetic construct
  misc_feature 1..1812: note = Variant of DNA polymerase
  source 1..1812: mol_type = other DNA
atgcatcaccatcaccatcacggtggcagcggtatggttgcaccacagaccaaaaaagaagaagccgtactgccgaacatcaattatacaattgtggaggaagtcagcgaaccgattctcgcggatcgttcggcgttagtggttgaggttctggaatccaactaccataaggctccgatcctgggctttgccctggccaatgaacacggtaacttcttcattcgcactgacacggctctttcttctccgctgtttaccgcgtggctggaggatgagagcaagaagaaatcagtattcgacggaaaacgcgcaatcgtggccctgaaatggaaaggcattgaattacgtggcatcgaatttgacttgttgatcgcttcatatctcctgaatccctcgcaaagcacggaagatgtcgcaagcgtggccaagaccaaacagtacatggcagtacagagtgatgaagcagtctatggaaaaggtgcgaaacaaacggtgccagatgaaaacgttttagccgaacatctggtgcgtaaagctgctgcaattcgcgccctggagaaagaactgatccacgatttgcaggaaaatgaacaatacgccctgtttactgaccttgaattacctctgtcctcgattctggcagagatggaatttaccggtgtgaaagtagatgttgaacgcctgaaagaaatgggcgaggagctcacagaacaactgcgcgcagtggagcaggaaatctataagttagctggccaagaattcaacattaacagccctaaacaactgggtgtcattctgtttgaaaaattacagcttcccgtcctgaagaagacgaagaccggctatagtacgagtgctgatgtgctcgagaaacttgccccgcagcatgaaatcgtcgagaaaattcttctgtaccgtcagctcggtaaactgcaatccacatatattgaagggctgctgaaagttgtacatcgcgacacccataaagtccacaccatcttcaaccaggccctgactcaaaccgggcgcctgtcaagcaccgaacctaatctccagaacatcccaattcgtctggaagaaggccgcaaaattcgccaagcatttgtgccatcgaaacctgactgggttatctttagcgcagattactcacagattgagctccgtgttctcgcacacattgcaaacgatgaaaatctgatcgatgcttttcgtcatgaccttgacatccatacgaagacagccatggatattttccatgtaacagcagatgaagttacccccaatatgcgtcgccaagcaaaagccgtgaacttcggtattgtctatgggatctctgattacggtctgagtcagaaccttaatatcccacgcaaagaagccgccgaatttattcgtcgttatttcgaaatttttcccggcgttaaacagtacatggagaatattgtacaggaagccaaacagaaaggatacgtcaccacccttttacaccgccgccgctatctgccagacatcacctctcgtaatttcaacttacgttcattcgcagaacgcacggccatgaacaccccaattcaaggatcagccgccgacatcatcaagaaggcaatgattgatttagctgatcgtctgaaacgcgagaaacttcaagctcgtatgctgctccaggttcatgacgaactgattcttgaagctcctcgtgaggaagtcgaacgcctgcagcagattgtacccgaggtcatggagaacgccatccagttaaccgtcccactgaaagttgattatcactacggtcctacgtggtacgacgctaag

SEQ ID NO: 62 - protein, 604 aa, synthetic construct
  REGION 1..604: note = Variant of DNA polymerase
MHHHHHHGGSGMVAPQTKKEEAVLPNINYTIVEEVSEPILADRSALVVEVLESNYHKAPILGFALANEHGNFFIRTDTALSSPLFTAWLEDESKKKSVFDGKRAIVALKWKGIELRGIEFDLLIASYLLNPSQSTEDVASVAKTKQYMAVQSDEAVYGKGAKQTVPDENVLAEHLVRKAAAIRALEKELIHDLQENEQYALFTDLELPLSSILAEMEFTGVKVDVERLKEMGEELTEQLRAVEQEIYKLAGQEFNINSPKQLGVILFEKLQLPVLKKTKTGYSTSADVLEKLAPQHEIVEKILLYRQLGKLQSTYIEGLLKVVHRDTHKVHTIFNQALTQTGRLSSTEPNLQNIPIRLEEGRKIRQAFVPSKPDWVIFSADYSQIELRVLAHIANDENLIDAFRHDLDIHTKTAMDIFHVTADEVTPNMRRQAKAVNFGIVYGISDYGLSQNLNIPRKEAAEFIRRYFEIFPGVKQYMENIVQEAKQKGYVTTLLHRRRYLPDITSRNFNLRSFAERTAMNTPIQGSAADIIKKAMIDLADRLKREKLQARMLLQVHDELILEAPREEVERLQQIVPEVMENAIQLTVPLKVDYHYGPTWYDAK

SEQ ID NO: 63 - DNA, 1812 bp, synthetic construct
  misc_feature 1..1812: note = Variant of DNA polymerase
  source 1..1812: mol_type = other DNA
atgcatcaccatcaccatcacggtggcagcggtatggttgcaccacagaccaaaaaagaagaagccgtactgccgaacatcaattatacaattgtggaggaagtcagcgaaccgattctcgcggatcgttcggcgttagtggttgaggttctggaatccaactaccataaggctccgatcctgggctttgccctggccaatgaacacggtaacttcttcattcgcactgacacggctctttcttctccgctgtttaccgcgtggctggaggatgagagcaagaagaaatcagtattcgacggaaaacgcgcaatcgtggccctgaaatggaaaggcattgaattacgtggcatcgaatttgacttgttgatcgcttcatatctcctgaatccctcgcaaagcacggaagatgtcgcaagcgtggccaagaccaaacagtacatggcagtacagagtgatgaagcagtctatggaaaaggtgcgaaacaaacggtgccagatgaaaacgttttagccgaacatctggtgcgtaaagctgctgcaattcgcgccctggagaaagaactgatccacgatttgcaggaaaatgaacaatacgccctgtttactgaccttgaattacctctgtcctcgattctggcagagatggaatttaccggtgtgaaagtagatgttgaacgcctgaaagaaatgggcgaggagctcacagaacaactgcgcgcagtggagcaggaaatctataagttagctggccaagaattcaacattaacagccctaaacaactgggtgtcattctgtttgaaaaattacagcttcccgtcctgaagaagacgaagaccggctatagtacgagtgctgatgtgctcgagaaacttgccccgaagcatgaaatcgtcgagaaaattcttcactaccgtcagctcggtaaactgcaatccacatatattgaagggctgctgaaagttgtacatcgcgacacccataaagtccacaccatcttcaaccaggccctgactcaaaccgggcgcctgtcaagcaccgaacctaatctccagaacatcccaattcgtctggaagaaggccgcaaaattcgccaagcatttgtgccatcgaaacctgactgggttatctttagcgcagattactcacagattgagctccgtgttctcgcacacattgcaaacgatgaaaatctgatcgatgcttttcgtcatgaccttgacatccatacgaagacagccatggatattttccatgtaacagcagatgaagttacccccaatatgcgtcgccaagcaaaagccgtgaacttcggtattgtctatgggatctctgattacggtctgagtcagaaccttaatatcccacgcaaagaagccgccgaatttattcgtcgttatttcgaaatttttcccggcgttaaacagtacatggagaatattgtacaggaagccaaacagaaaggatacgtcaccacccttttacaccgccgccgctatctgccagacatcacctctcgtaatttcaacttacgttcattcgcagaacgcacggccatgaacaccccaattcaaggatcagccgccgacatcatcaagaaggcaatgattgatttagctgatcgtctgaaacgcgagaaacttcaagctcgtatgctgctccaggttcatgacgaactgattcttgaagctcctcgtgaggaagtcgaacgcctgcagcagattgtacccgaggtcatggagaacgccatccagttaaccgtcccactgaaagttgattatcactacggtcctacgtggtacgacgctaag

SEQ ID NO: 64 - protein, 604 aa, synthetic construct
  REGION 1..604: note = Variant of DNA polymerase
MHHHHHHGGSGMVAPQTKKEEAVLPNINYTIVEEVSEPILADRSALVVEVLESNYHKAPILGFALANEHGNFFIRTDTALSSPLFTAWLEDESKKKSVFDGKRAIVALKWKGIELRGIEFDLLIASYLLNPSQSTEDVASVAKTKQYMAVQSDEAVYGKGAKQTVPDENVLAEHLVRKAAAIRALEKELIHDLQENEQYALFTDLELPLSSILAEMEFTGVKVDVERLKEMGEELTEQLRAVEQEIYKLAGQEFNINSPKQLGVILFEKLQLPVLKKTKTGYSTSADVLEKLAPKHEIVEKILHYRQLGKLQSTYIEGLLKVVHRDTHKVHTIFNQALTQTGRLSSTEPNLQNIPIRLEEGRKIRQAFVPSKPDWVIFSADYSQIELRVLAHIANDENLIDAFRHDLDIHTKTAMDIFHVTADEVTPNMRRQAKAVNFGIVYGISDYGLSQNLNIPRKEAAEFIRRYFEIFPGVKQYMENIVQEAKQKGYVTTLLHRRRYLPDITSRNFNLRSFAERTAMNTPIQGSAADIIKKAMIDLADRLKREKLQARMLLQVHDELILEAPREEVERLQQIVPEVMENAIQLTVPLKVDYHYGPTWYDAK

SEQ ID NO: 65 - DNA, 1812 bp, synthetic construct
  misc_feature 1..1812: note = Variant of DNA polymerase
  source 1..1812: mol_type = other DNA
atgcatcaccatcaccatcacggtggcagcggtatggttgcaccacagaccaaaaaagaagaagccgtactgccgaacatcaattatacaattgtggaggaagtcagcgaaccgattctcgcggatcgttcggcgttagtggttgaggttctggaatccaactaccataaggctccgatcctgggctttgccctggccaatgaacacggtaacttcttcattcgcactgacacggctctttcttctccgctgtttaccgcgtggctggaggatgagagcaagaagaaatcagtattcgacggaaaacgcgcaatcgtggccctgaaatggaaaggcattgaattacgtggcatcgaatttgacttgttgatcgcttcatatctcctgaatccctcgcaaagcacggaagatgtcgcaagcgtggccaagaccaaacagtacatggcagtacagagtgatgaagcagtctatggaaaaggtgcgaaacaaacggtgccagatgaaaacgttttagccgaacatctggtgcgtaaagctgctgcaattcgcgccctggagaaagaactgatccacgatttgcaggaaaatgaacaatacgccctgtttactgaccttgaattacctctgtcctcgattctggcagagatggaatttaccggtgtgaaagtagatgttgaacgcctgaaagaaatgggcgaggagctcacagaacaactgcgcgcagtggagcaggaaatctataagttagctggccaagaattcaacattaacagccctaaacaactgggtgtcattctgtttgaaaaattacagcttcccgtcctgaagaagacgaagaccggctatagtacgagtgctgatgtgctcgagaaacttgccccgcagcatgaaatcgtcgagaaaattcttcactaccgtcagctcggtaaactgcaatccacatatattgaagggctgctgaaagttgtacatcgcgacacccataaagtccacaccatcttcaaccaggccctgactcaaaccgggcgcctgtcaagcaccgaacctaatctccagaacatcccaattcgtctggaagaaggccgcaaaattcgccaagcatttgtgccatcgaaacctgactgggttatctttagcgcagattactcacagattgagctccgtgttctcgcacacattgcaaacgatgaaaatctgatcgatgcttttcgtcatgaccttgacatccatacgaagacagccatggatattttccatgtaacagcagatgaagttacccccaatatgcgtcgccaagcaaaagccgtgaacttcggtattgtctatgggatctctgattacggtctgagtcagaaccttaatatcccacgcaaagaagccgccgaatttattcgtcgttatttcgaaatttttcccggcgttaaacagtacatggagaatattgtacaggaagccaaacagaaaggatacgtcaccacccttttacaccgccgccgctatctgccagacatcacctctcgtaatttcaacttacgttcattcgcagaacgcacggccatgaacaccccaattcaaggatcagccgccgacatcatcaagaaggcaatgattgatttagctgatcgtctgaaacgcgagaaacttcaagctcgtatgctgctccaggttcatgacgaactgattcttgaagctcctcgtgaggaagtcgaacgcctgcagcagattgtaccctttgtcatggagaacgccatccagttaaccgtcccactgaaagttgattatcactacggtcctacgtggtacgacgctaag

SEQ ID NO: 66 - protein, 604 aa, synthetic construct
  REGION 1..604: note = Variant of DNA polymerase
MHHHHHHGGSGMVAPQTKKEEAVLPNINYTIVEEVSEPILADRSALVVEVLESNYHKAPILGFALANEHGNFFIRTDTALSSPLFTAWLEDESKKKSVFDGKRAIVALKWKGIELRGIEFDLLIASYLLNPSQSTEDVASVAKTKQYMAVQSDEAVYGKGAKQTVPDENVLAEHLVRKAAAIRALEKELIHDLQENEQYALFTDLELPLSSILAEMEFTGVKVDVERLKEMGEELTEQLRAVEQEIYKLAGQEFNINSPKQLGVILFEKLQLPVLKKTKTGYSTSADVLEKLAPQHEIVEKILHYRQLGKLQSTYIEGLLKVVHRDTHKVHTIFNQALTQTGRLSSTEPNLQNIPIRLEEGRKIRQAFVPSKPDWVIFSADYSQIELRVLAHIANDENLIDAFRHDLDIHTKTAMDIFHVTADEVTPNMRRQAKAVNFGIVYGISDYGLSQNLNIPRKEAAEFIRRYFEIFPGVKQYMENIVQEAKQKGYVTTLLHRRRYLPDITSRNFNLRSFAERTAMNTPIQGSAADIIKKAMIDLADRLKREKLQARMLLQVHDELILEAPREEVERLQQIVPFVMENAIQLTVPLKVDYHYGPTWYDAK

SEQ ID NO: 67 - DNA, 1812 bp, synthetic construct
  misc_feature 1..1812: note = Variant of DNA polymerase
  source 1..1812: mol_type = other DNA
atgcatcaccatcaccatcacggtggcagcggtatggttgcaccacagaccaaaaaagaagaagccgtactgccgaacatcaattatacaattgtggaggaagtcagcgaaccgattctcgcggatcgttcggcgttagtggttgaggttctggaatccaactaccataaggctccgatcctgggctttgccctggccaatgaacacggtaacttcttcattcgcactgacacggctctttcttctccgctgtttaccgcgtggctggaggatgagagcaagaagaaatcagtattcgacggaaaacgcgcaatcgtggccctgaaatggaaaggcattgaattacgtggcatcgaatttgacttgttgatcgcttcatatctcctgaatccctcgcaaagcacggaagatgtcgcaagcgtggccaagaccaaacagtacatggcagtacagagtgatgaagcagtctatggaaaaggtgcgaaacaaacggtgccagatgaaaacgttttagccgaacatctggtgcgtaaagctgctgcaattcgcgccctggagaaagaactgatccacgatttgcaggaaaatgaacaatacgccctgtttactgaccttgaattacctctgtcctcgattctggcagagatggaatttaccggtgtgaaagtagatgttgaacgcctgaaagaaatgggcgaggagctcacagaacaactgcgcgcagtggagcaggaaatctataagttagctggccaagaattcaacattaacagccctaaacaactgggtgtcattctgtttgaaaaattacagcttcccgtcctgaagaagacgaagaccggctatagtacgagtgctgatgtgctcgagaaacttgccccgcagcatgaaatcgtcgagaaaattcttcactaccgtcagctcggtaaactgcaatccacatatattgaagggctgctgaaagttgtacatcgcgacacccataaagtccacaccatcttcaaccaggccctgactcaaaccgggcgcctgtcaagcaccgaacctaatctccagaacatcccaattcgtctggaagaaggccgcaaaattcgccaagcatttgtgccatcgaaacctgactgggttatctttagcgcagattactcacagattgagctccgtgttctcgcacacattgcaaacgatgaaaatctgatcgatgcttttcgtcatgaccttgacatccatacgaagacagccatggatattttccatgtaacagcagatgaagttacccccaatatgcgtcgccaagcaaaagccgtgaacttcggtattgtctatgggatctctgattacggtctgagtcagaaccttaatatcccacgcaaagaagccgccgaatttattcgtcgttatttcgaaatttttcccggcgttaaacagtacatggagaatattgtacaggaagccaaacagaaaggatacgtcaccacccttttacaccgccgccgctatctgccagacatcacctctcgtaatttcaacttacgttcattcgcagaacgcacggccatgaacaccccaattcaaggatcagccgccgacatcatcaagaaggcaatgattgatttagctactcgtctgaaacgcgagaaacttcaagctcgtatgctgctccaggttcatgacgaactgattcttgaagctcctcgtgaggaagtcgaacgcctgcagcagattgtacccgaggtcatggagaacgccatccagttaaccgtcccactgaaagttgattatcactacggtcctacgtggtacgacgctaag

SEQ ID NO: 68 - protein, 604 aa, synthetic construct
  REGION 1..604: note = Variant of DNA polymerase
MHHHHHHGGSGMVAPQTKKEEAVLPNINYTIVEEVSEPILADRSALVVEVLESNYHKAPILGFALANEHGNFFIRTDTALSSPLFTAWLEDESKKKSVFDGKRAIVALKWKGIELRGIEFDLLIASYLLNPSQSTEDVASVAKTKQYMAVQSDEAVYGKGAKQTVPDENVLAEHLVRKAAAIRALEKELIHDLQENEQYALFTDLELPLSSILAEMEFTGVKVDVERLKEMGEELTEQLRAVEQEIYKLAGQEFNINSPKQLGVILFEKLQLPVLKKTKTGYSTSADVLEKLAPQHEIVEKILHYRQLGKLQSTYIEGLLKVVHRDTHKVHTIFNQALTQTGRLSSTEPNLQNIPIRLEEGRKIRQAFVPSKPDWVIFSADYSQIELRVLAHIANDENLIDAFRHDLDIHTKTAMDIFHVTADEVTPNMRRQAKAVNFGIVYGISDYGLSQNLNIPRKEAAEFIRRYFEIFPGVKQYMENIVQEAKQKGYVTTLLHRRRYLPDITSRNFNLRSFAERTAMNTPIQGSAADIIKKAMIDLATRLKREKLQARMLLQVHDELILEAPREEVERLQQIVPEVMENAIQLTVPLKVDYHYGPTWYDAK

SEQ ID NO: 69 - DNA, 1812 bp, synthetic construct
  misc_feature 1..1812: note = Variant of DNA polymerase
  source 1..1812: mol_type = other DNA
atgcatcaccatcaccatcacggtggcagcggtatggttgcaccacagaccaaaaaagaagaagccgtactgccgaacatcaattatacaattgtggaggaagtcagcgaaccgattctcgcggatcgttcggcgttagtggttgaggttctggaatccaactaccataaggctccgatcctgggctttgccctggccaatgaacacggtaacttcttcattcgcactgacacggctctttcttctccgctgtttaccgcgtggctggaggatgagagcaagaagaaatcagtattcgacggtaaacgcgcaatcgtggccctgaaatggaaaggcattgaattacgtggcatcgaatttgacttgttgatcgcttcatatctcctgaatccctcgcaaagcacggaagatgtcgcaagcgtggccaagaccaaacagtacatggcagtacagagtgatgaagcagtctatggaaaaggtgcgaaacaaacggtgccagatgaaaacgttttagccgaacatctggtgcgtaaagctgctgcaattcgcgccctggagaaagaactgatccacgatttgcaggaaaatgaacaatacgccctgtttactgaccttgaattacctctgtcctcgattctggcagagatggaatttaccggtgtgaaagtagatgttgaacgcctgaaagaaatgggcgaggagctcacagaacaactgcgcgcagtggagcaggaaatctataagttagctggccaagaattcaacattaacagccctaaacaactgggtgtcattctgtttgaaaaattacagcttcccgtcctgaagaagacgaagaccggctatagtacgagtgctgatgtgctcgagaaacttgccccgcagcatgaaatcgtcgagaaaattcttcactaccgtcagctcggtaaactgcaatccacatatattgaagggctgctgaaagttgtacatcgcgacacccataaagtccacaccatcttcaaccaggccctgactcaaaccgggcgcctgtcaagcaccgaacctaatctccagaacatcccaattcgtctggaagaaggccgcaaaattcgccaagcatttgtgccatcgaaacctgactgggttatctttagcgcagattactcacagattgagctccgtgttctcgcacacattgcaaacgatgaaaatctgatcgatgcttttcgtcatgaccttgacatccatacgaagacagccatggatattttccatgtaacagcagatgaagttacccccaatatgcgtcgccaagcaaaagccgtgaacttcggtattgtctatgggatctctgattacggtctgagtcagaaccttaatatcactcgcaaagaagccgccgaatttattcgtcgttatttcgaaagctttcccggcgttaaacagtacatggagaatattgtacaggaagccaaacagaaaggatacgtcaccacccttttacaccgccgccgctatctgccagacatcacctctcgtaatttcaacttacgttcattcgcagaacgcacggccatgaacaccccaattcaaggatcagccgccgacatcatcaagaaggcaatgattgatttagctgatcgtctgaaacgcgagaaacttcaagctcgtatgctgctccaggttcatgacgaactgattcttgaagctcctcgtgaggaagtcgaacgcctgcagcagattgtacccgaggtcatggagaacgccatccagttaaccgtcccactgaaagttgattatcactacggtcctacgtggtacgacgctaag

SEQ ID NO: 70 - protein, 604 aa, synthetic construct
  REGION 1..604: note = Variant of DNA polymerase
MHHHHHHGGSGMVAPQTKKEEAVLPNINYTIVEEVSEPILADRSALVVEVLESNYHKAPILGFALANEHGNFFIRTDTALSSPLFTAWLEDESKKKSVFDGKRAIVALKWKGIELRGIEFDLLIASYLLNPSQSTEDVASVAKTKQYMAVQSDEAVYGKGAKQTVPDENVLAEHLVRKAAAIRALEKELIHDLQENEQYALFTDLELPLSSILAEMEFTGVKVDVERLKEMGEELTEQLRAVEQEIYKLAGQEFNINSPKQLGVILFEKLQLPVLKKTKTGYSTSADVLEKLAPQHEIVEKILHYRQLGKLQSTYIEGLLKVVHRDTHKVHTIFNQALTQTGRLSSTEPNLQNIPIRLEEGRKIRQAFVPSKPDWVIFSADYSQIELRVLAHIANDENLIDAFRHDLDIHTKTAMDIFHVTADEVTPNMRRQAKAVNFGIVYGISDYGLSQNLNITRKEAAEFIRRYFESFPGVKQYMENIVQEAKQKGYVTTLLHRRRYLPDITSRNFNLRSFAERTAMNTPIQGSAADIIKKAMIDLADRLKREKLQARMLLQVHDELILEAPREEVERLQQIVPEVMENAIQLTVPLKVDYHYGPTWYDAK

SEQ ID NO: 71 - DNA, 1812 bp, synthetic construct
  misc_feature 1..1812: note = Variant of DNA polymerase
  source 1..1812: mol_type = other DNA
atgcatcaccatcaccatcacggtggcagcggtatggttgcaccacagaccaaaaaagaagaagccgtactgccgaacatcaattatacaattgtggaggaagtcagcgaaccgattctcgcggatcgttcggcgttagtggttgaggttctggaatccaactaccataaggctccgatcctgggctttgccctggccaatgaacacggtaacttcttcattcgcactgacacggctctttcttctccgctgtttaccgcgtggctggaggatgagagcaagaagaaatcagtattcgacggaaaacgcgcaatcgtggccctgaaatggaaaggcattgaattacgtggcatcgaatttgacttgttgatcgcttcatatctcctgaatccctcgcaaagcacggaagatgtcgcaagcgtggccaagaccaaacagtacatggcagtacagagtgatgaagcagtctatggaaaaggtgcgaaacaaacggtgccagatgaaaacgttttagccgaacatctggtgcgtaaagctgctgcaattcgcgccctggagaaagaactgatccacgatttgcaggaaaatgaacaatacgccctgtttactgaccttgaattacctctgtcctcgattctggcagagatggaatttaccggtgtgaaagtagatgttgaacgcctgaaagaaatgggcgaggagctcacagaacaactgcgcgcagtggagcaggaaatctataagttagctggccaacgtttcaacattaacagccctaaacaactgggtgtcattctgtttgaaaaattacagcttcccgtcctgaagaagacgaagaccggctatagtacgagtgctgatgtgctcgagaaacttgccccgcagcatgaaatcgtcgagaaaattcttcactaccgtcagctcggtaaactgcaatccacatatattgaagggctgctgaaagttgtacatcgcgacacccataaagtccacaccatcttcaaccaggccctgactcaaaccgggcgcctgtcaagcaccgaacctaatctccagaacatcccaattcgtctggaagaaggccgcaaaattcgccaagcatttgtgccatcgaaacctgactgggttatctttagcgcagattactcacagattgagctccgtgttctcgcacacattgcaaacgatgaaaatctgatcgatgcttttcgtcatgaccttgacatccatacgaagacagccatggatattttccatgtaacagcagatgaagttacccccaatatgcgtcgccaagcaaaagccgtgaacttcggtattgtctatgggatctctgattacggtctgagtcagaaccttaatatcccacgcaaagaagccgccgaatttattcgtcgttatttcgaaatttttcccggcgttaaacagtacatggagaatattgtacaggaagccaaacagaaaggatacgtcaccacccttttacaccgccgccgctatctgccagacatcacctctcgtaatttcaacttacgttcattcgcagaacgcacggccatgaacaccccaattcaaggatcagccgccgacatcatcaagaaggcaatgattgatttagctgatcgtctgaaacgcgagaaacttcaagctcgtatgctgctccaggttcatgacgaactgattcttgaagctcctcgtgaggaagtcgaacgcctgcagcagattgtacccgaggtcatggagaacgccatccagttaaccgtcccactgaaagttgattatcactacggtcctacgtggtacgacgctaag

SEQ ID NO: 72 - protein, 604 aa, synthetic construct
  REGION 1..604: note = Variant of DNA polymerase
MHHHHHHGGSGMVAPQTKKEEAVLPNINYTIVEEVSEPILADRSALVVEVLESNYHKAPILGFALANEHGNFFIRTDTALSSPLFTAWLEDESKKKSVFDGKRAIVALKWKGIELRGIEFDLLIASYLLNPSQSTEDVASVAKTKQYMAVQSDEAVYGKGAKQTVPDENVLAEHLVRKAAAIRALEKELIHDLQENEQYALFTDLELPLSSILAEMEFTGVKVDVERLKEMGEELTEQLRAVEQEIYKLAGQRFNINSPKQLGVILFEKLQLPVLKKTKTGYSTSADVLEKLAPQHEIVEKILHYRQLGKLQSTYIEGLLKVVHRDTHKVHTIFNQALTQTGRLSSTEPNLQNIPIRLEEGRKIRQAFVPSKPDWVIFSADYSQIELRVLAHIANDENLIDAFRHDLDIHTKTAMDIFHVTADEVTPNMRRQAKAVNFGIVYGISDYGLSQNLNIPRKEAAEFIRRYFEIFPGVKQYMENIVQEAKQKGYVTTLLHRRRYLPDITSRNFNLRSFAERTAMNTPIQGSAADIIKKAMIDLADRLKREKLQARMLLQVHDELILEAPREEVERLQQIVPEVMENAIQLTVPLKVDYHYGPTWYDAK

SEQ ID NO: 73 - DNA, 1812 bp, synthetic construct
  misc_feature 1..1812: note = Variant of DNA polymerase
  source 1..1812: mol_type = other DNA
atgcatcaccatcaccatcacggtggcagcggtatggttgcaccacagaccaaaaaagaagaagccgtactgccgaacatcaattatacaattgtggaggaagtcagcgaaccgattctcgcggatcgttcggcgttagtggttgaggttctggaatccaactaccataaggctccgatcctgggctttgccctggccaatgaacacggtaacttcttcattcgcactgacacggctctttcttctccgctgtttaccgcgtggctggaggatgagagcaagaagaaatcagtattcgacggaaaacgcgcaatcgtggccctgaaatggaaaggcattgaattacgtggcatcgaatttgacttgttgatcgcttcatatctcctgaatccctcgcaaagcacggaagatgtcgcaagcgtggccaagaccaaacagtacatggcagtacagagtgatgaagcagtctatggaaaaggtgcgaaacaaacggtgccagatgaaaacgttttagccgaacatctggtgcgtaaagctgctgcaattcgcgccctggagaaagaactgatccacgatttgcaggaaaatgaacaatacgccctgtttactgaccttgaattacctctgtcctcgattctggcagagatggaatttaccggtgtgaaagtagatgttgaacgcctgaaagaaatgggcgaggagctcacagaacaactgcgcgcagtggagcaggaaatctataagttagctggccaagaattcaacattaacagccctaaacaactgggtgtcattctgtttgaaaaattacagcttcccgtcctgaagaagacgaagaccggctatagtacgagtgctgatgtgctcggtaaacttgccccgcagcatgaaatcgtcgagaaaattcttcactaccgtcagctcggtaaactgcaatccacatatattgaagggctgctgaaagttgtacatcgcgacacccataaagtccacaccatcttcaaccaggccctgactcaaaccgggcgcctgtcaagcaccgaacctaatctccagaacatcccaattcgtctggaagaaggccgcaaaattcgccaagcatttgtgccatcgaaacctgactgggttatctttagcgcagattactcacagattgagctccgtgttctcgcacacattgcaaacgatgaaaatctgatcgatgcttttcgtcatgaccttgacatccatacgaagacagccatggatattttccatgtaacagcagatgaagttacccccaatatgcgtcgccaagcaaaagccgtgaacttcggtattgtctatgggatctctgattacggtctgagtcagaaccttaatatcccacgcaaagaagccgccgaatttattcgtcgttatttcgaaatttttcccggcgttaaacagtacatggagaatattgtacaggaagccaaacagaaaggatacgtcaccacccttttacaccgccgccgctatctgccagacatcacctctcgtaatttcaacttacgttcattcgcagaacgcacggccatgaacaccccaattcaaggatcagccgccgacatcatcaagaaggcaatgattgatttagctgatcgtctgaaacgcgagaaacttcaagctcgtatgctgctccaggttcatgacgaactgattcttgaagctcctcgtgaggaagtcgaacgcctgcagcagattgtacccgaggtcatggagaacgccatccagttaaccgtcccactgaaagttgattatcactacggtcctacgtggtacgacgctaag

SEQ ID NO: 74 - protein, 604 aa, synthetic construct
  REGION 1..604: note = Variant of DNA polymerase
MHHHHHHGGSGMVAPQTKKEEAVLPNINYTIVEEVSEPILADRSALVVEVLESNYHKAPILGFALANEHGNFFIRTDTALSSPLFTAWLEDESKKKSVFDGKRAIVALKWKGIELRGIEFDLLIASYLLNPSQSTEDVASVAKTKQYMAVQSDEAVYGKGAKQTVPDENVLAEHLVRKAAAIRALEKELIHDLQENEQYALFTDLELPLSSILAEMEFTGVKVDVERLKEMGEELTEQLRAVEQEIYKLAGQEFNINSPKQLGVILFEKLQLPVLKKTKTGYSTSADVLGKLAPQHEIVEKILHYRQLGKLQSTYIEGLLKVVHRDTHKVHTIFNQALTQTGRLSSTEPNLQNIPIRLEEGRKIRQAFVPSKPDWVIFSADYSQIELRVLAHIANDENLIDAFRHDLDIHTKTAMDIFHVTADEVTPNMRRQAKAVNFGIVYGISDYGLSQNLNIPRKEAAEFIRRYFEIFPGVKQYMENIVQEAKQKGYVTTLLHRRRYLPDITSRNFNLRSFAERTAMNTPIQGSAADIIKKAMIDLADRLKREKLQARMLLQVHDELILEAPREEVERLQQIVPEVMENAIQLTVPLKVDYHYGPTWYDAK

SEQ ID NO: 75 - DNA, 1812 bp, synthetic construct
  misc_feature 1..1812: note = Variant of DNA polymerase
  source 1..1812: mol_type = other DNA
atgcatcaccatcaccatcacggtggcagcggtatggttgcaccacagaccaaaaaagaagaagccgtactgccgaacatcaattatacaattgtggaggaagtcagcgaaccgattctcgcggatcgttcggcgttagtggttgaggttctggaatccaactaccataaggctccgatcctgggctttgccctggccaatgaacacggtaacttcttcattcgcactgacacggctctttcttctccgctgtttaccgcgtggctggaggatgagagcaagaagaaatcagtattcgacggtaaacgcgcaatcgtggccctgaaatggaaaggcattgaattacgtggcatcgaatttgacttgttgatcgcttcatatctcctgaatccctcgcaaagcacggaagatgtcgcaagcgtggccaagaccaaacagtacatggcagtacagagtgatgaagcagtctatggaaaaggtgcgaaacaaacggtgccagatgaaaacgttttagccgaacatctggtgcgtaaagctgctgcaattcgcgccctggagaaagaactgatccacgaattgcaggaaaatgaacaatacgccctgtttactgaccttgaattacctctgtcctcgattctggcagagatggaatttaccggtgtgaaagtagatgttgaacgcctgaaagaaatgggcgaggagctcacagaacaactgcgcgaagtggagcaggaaatctataagttagctggccaagaattcaacattaacagccctaaacaactgggtgtcattctgtttgaaaaattacagcttcccgtcctgaagaagacgaagaccggctatagtacgagtgctgatgtgctcgagaaacttgccccgcagcatgaaatcgtcgagaaaattcttcactaccgtcagctcggtaaactgcaatccacatatattgaagggctgctgaaagttgtacatcgcgacacccataaagtccacaccatcttcaaccaggccctgactcaaaccgggcgcctgtcaagcaccgaacctaatctccagaacatcccaattcgtctggaagaaggccgcaaaattcgccaagcatttgtgccatcggaacctgactgggttatctttagcgcagattactcacagattgagctccgtgttctcgcacacattgcaaacgatgaaaatctgatcgatgcttttcgtcatgaccttgacatccatacgaagacagccatggatattttccatgtaacagcagatgaagttacccccaatatgcgtcgccaagcaaaagccgtgaacttcggtattgtctatgggatctctgattacggtctgagtcagaaccttaatatcactcgcaaagaagccgccgaatttattcgtcgttatttcgaaatctttcccggcgttaaacagtacatggagaatattgtacaggaagccaaacagaaaggatacgtcaccacccttttacaccgccgccgctatctgccagacatcacctctcgtaatttcaacttacgttcattcgcagaacgcacggccatgaacaccccaattcaaggatcagccgccgacatcatcaagaaggcaatgattgatttagctgatcgtctgaaacgcgagaaacttcaagctcgtatgctgctccaggttcatgacgaactgattcttgaagctcctcgtgaggaagtcgaacgcctgcagcagattgtacccgaggtcatggagaacgccatccagttaaccgtcccactgaaagttgattatcactacggtcctacgtggtacgacgctaag

SEQ ID NO: 76 - protein, 604 aa, synthetic construct
  REGION 1..604: note = Variant of DNA polymerase
MHHHHHHGGSGMVAPQTKKEEAVLPNINYTIVEEVSEPILADRSALVVEVLESNYHKAPILGFALANEHGNFFIRTDTALSSPLFTAWLEDESKKKSVFDGKRAIVALKWKGIELRGIEFDLLIASYLLNPSQSTEDVASVAKTKQYMAVQSDEAVYGKGAKQTVPDENVLAEHLVRKAAAIRALEKELIHELQENEQYALFTDLELPLSSILAEMEFTGVKVDVERLKEMGEELTEQLREVEQEIYKLAGQEFNINSPKQLGVILFEKLQLPVLKKTKTGYSTSADVLEKLAPQHEIVEKILHYRQLGKLQSTYIEGLLKVVHRDTHKVHTIFNQALTQTGRLSSTEPNLQNIPIRLEEGRKIRQAFVPSEPDWVIFSADYSQIELRVLAHIANDENLIDAFRHDLDIHTKTAMDIFHVTADEVTPNMRRQAKAVNFGIVYGISDYGLSQNLNITRKEAAEFIRRYFEIFPGVKQYMENIVQEAKQKGYVTTLLHRRRYLPDITSRNFNLRSFAERTAMNTPIQGSAADIIKKAMIDLADRLKREKLQARMLLQVHDELILEAPREEVERLQQIVPEVMENAIQLTVPLKVDYHYGPTWYDAK

SEQ ID NO: 77 - DNA, 1812 bp, synthetic construct
  misc_feature 1..1812: note = Variant of DNA polymerase
  source 1..1812: mol_type = other DNA
atgcatcaccatcaccatcacggtggcagcggtatggttgcaccacagaccaaaaaagaagaagccgtactgccgaacatcaattatacaattgtggaggaagtcagcgaaccgattctcgcggatcgttcggcgttagtggttgaggttctggaatccaactaccataaggctccgatcctgggctttgccctggccaatgaacacggtaacttcttcattcgcactgacacggctctttcttctccgctgtttaccgcgtggctggaggatgagagcaagaagaaatcagtattcgacggaaaacgcgcaatcgtggccctgaaatggaaaggcattgaattacgtggcatcgaatttgacttgttgatcgcttcatatctcctgaatccctcgcaaagcacggaagatgtcgcaagcgtggccaagaccaaacagtacatggcagtacagagtgatgaagcagtctatggaaaaggtgcgaaacaaacggtgccagatgaaaacgttttagccgaacatctggtgcgtaaagctgctgcaattcgcgccctggagaaagaactgatccacgatttgcaggaaaatgaacaatacgccctgtttactgaccttgaattacctctgtcctcgattctggcagagatggaatttaccggtgtgaaagtagatgttgaacgcctgaaagaaatgggcgaggagctcacagaacaactgcgcgcagtggagcaggaaatctataagttagctggcactgaattcaacattaacagccctaaacaactgggtgtcattctgtttgaaaaattacagcttcccgtcctgaagaagacgaagaccggctatagtacgagtgctgatgtgctcgagaaacttgccccgcagcatgaaatcgtcgagaaaattcttcactaccgtcagctcggtaaactgcaatccacatatattgaagggctgctgaaagttgtacatcgcgacacccataaagtccacaccatcttcaaccaggccctgactcaaaccgggcgcctgtcaagcaccgaacctaatctccagaacatcccaattcgtctggaagaaggccgcaaaattcgccaagcatttgtgccatcgaaacctgactgggttatctttagcgcagattactcacagattgagctccgtgttctcgcacacattgcaaacgatgaaaatctgatcgatgcttttcgtcatgaccttgacatccatacgaagacagccatggatattttccatgtaacagcagatgaagttacccccaatatgcgtcgccaagcaaaagccgtgaacttcggtattgtctatgggatctctgattacggtctgagtcagaaccttaatatcccacgcaaagaagccgccgaatttattcgtcgttatttcgaaatttttcccggcgttaaacagtacatggagaatattgtacaggaagccaaacagaaaggatacgtcaccacccttttacaccgccgccgctatctgccagacatcacctctcgtaatttcaacttacgttcattcgcagaacgcacggccatgaacaccccaattcaaggatcagccgccgacatcatcaagaaggcaatgattgatttagctgatcgtctgaaacgcgagaaacttcaagctcgtatgctgctccaggttcatgacgaactgattcttgaagctcctcgtgaggaagtcgaacgcctgcagcagattgtacccgaggtcatggagaacgccatccagttaaccgtcccactgaaagttgattatcactacggtcctacgtggtacgacgctaag

SEQ ID NO: 78 - protein, 604 aa, synthetic construct
  REGION 1..604: note = Variant of DNA polymerase
MHHHHHHGGSGMVAPQTKKEEAVLPNINYTIVEEVSEPILADRSALVVEVLESNYHKAPILGFALANEHGNFFIRTDTALSSPLFTAWLEDESKKKSVFDGKRAIVALKWKGIELRGIEFDLLIASYLLNPSQSTEDVASVAKTKQYMAVQSDEAVYGKGAKQTVPDENVLAEHLVRKAAAIRALEKELIHDLQENEQYALFTDLELPLSSILAEMEFTGVKVDVERLKEMGEELTEQLRAVEQEIYKLAGTEFNINSPKQLGVILFEKLQLPVLKKTKTGYSTSADVLEKLAPQHEIVEKILHYRQLGKLQSTYIEGLLKVVHRDTHKVHTIFNQALTQTGRLSSTEPNLQNIPIRLEEGRKIRQAFVPSKPDWVIFSADYSQIELRVLAHIANDENLIDAFRHDLDIHTKTAMDIFHVTADEVTPNMRRQAKAVNFGIVYGISDYGLSQNLNIPRKEAAEFIRRYFEIFPGVKQYMENIVQEAKQKGYVTTLLHRRRYLPDITSRNFNLRSFAERTAMNTPIQGSAADIIKKAMIDLADRLKREKLQARMLLQVHDELILEAPREEVERLQQIVPEVMENAIQLTVPLKVDYHYGPTWYDAK

SEQ ID NO: 79 - DNA, 1812 bp, synthetic construct
  misc_feature 1..1812: note = Variant of DNA polymerase
  source 1..1812: mol_type = other DNA
atgcatcaccatcaccatcacggtggcagcggtatggttgcaccacagaccaaaaaagaagaagccgtactgccgaacatcaattatacaattgtggaggaagtcaccgaaccgattctcgcggatcgttcggcgttagtggttgaggttctggggtccaactaccataaggctccgatcctgggctttgccctggccaatgaacacggtaacttcttcattcgcactgacacggctctttcttctccgctgtttaccgcgtggctggaggatgagagcaagaagaaatcagtattcgacgctaaacgcgcaatcgtggccctgaaatggaaaggcattgaattacgtggcatcgaatttgacttgttgctggcttcatatctcctgaatccctcgcaaagcacggaagatgtcgcaagcgtggccaagaccaaacagtacatggcagtacagagtgatgaggcagtctatggaaaaggtgcgaaacaaacggtgccagatgaaaacgttttagccgaacatctggtgcgtaaagctgctgcaattcgcgccctggagaaagaactgatccacgatttgcaggaaaatgaacaatacgccctgtttactgaccttgaattacctctgtcctcggtcctggcagagatggaatttaccggtgtgaaagtagatgttgaacgcctgaaagaaatgggcgaggagctcacagaacaactgcgccaagtggagcaggaaatctataagttagctggccaagaattcaacattaacagccctaaacaactgggtgtcattctgtttgaaaaattacagcttcccgtcctgaagaagacgaagaccggctatagtacgagtgctgatgtgctcgagaaacttgcccgtcagcatgaaatcgtcgagaaaattcttcactaccgtcagctcggtaaactgcaatccacatatattgaagggctgctgaaagttgtacatcgcgacacccataaagtccacaccatcttcaaccaggccctgactcaaaccgggcgcctgtcaagcaccgaacctaatctccagaacatcccaattcgtctggaagaaggccgcaaaattcgccaagcatttgtgccatcgaaacctgactgggttatctttagcgcagattactcacagattgagctccgtgttctcgcacacctggcaaacgatgaaaatctgatcgatgcttttcgtcatgaccttgacatccatacgaagacagccatggatattttccatgtaacagcagatgaagttacccccaatatgcgtcgccaagcaaaagccgtgaacttcggtattgtctatgggatctctgattacggtctgagtcagcgtcttaatatcccacgcaaagaagccgccgaatttattcgtcgttatttcgaaagctttcccggcgttaaacagtacatggagaatattgtaaaagaagccaaacagaaaggatacgtcaccacccttttacaccgccgccgctatctgccagacatcacctctcgtaatcgtaacttacgttcattcgcagaacgcacggccatgaacaccccaattcaaggatcagccgccgacatcatcaagaaggcaatgattgatttagctgatcgtctgaaacgcgagaaacttcaagctcgtatgctgctccaggttcatgacgaactgattcttgaagctcctcgtgaggaagtcgaacgcctgcagcagattgtacccgaggtcatggagaacgccatccagttaaccgtcccactgaaagttgattatcactacggtcctacgtggtacgacgctaag

SEQ ID NO: 80 - protein, 604 aa, synthetic construct
  REGION 1..604: note = Variant of DNA polymerase
MHHHHHHGGSGMVAPQTKKEEAVLPNINYTIVEEVTEPILADRSALVVEVLGSNYHKAPILGFALANEHGNFFIRTDTALSSPLFTAWLEDESKKKSVFDAKRAIVALKWKGIELRGIEFDLLLASYLLNPSQSTEDVASVAKTKQYMAVQSDEAVYGKGAKQTVPDENVLAEHLVRKAAAIRALEKELIHDLQENEQYALFTDLELPLSSVLAEMEFTGVKVDVERLKEMGEELTEQLRQVEQEIYKLAGQEFNINSPKQLGVILFEKLQLPVLKKTKTGYSTSADVLEKLARQHEIVEKILHYRQLGKLQSTYIEGLLKVVHRDTHKVHTIFNQALTQTGRLSSTEPNLQNIPIRLEEGRKIRQAFVPSKPDWVIFSADYSQIELRVLAHLANDENLIDAFRHDLDIHTKTAMDIFHVTADEVTPNMRRQAKAVNFGIVYGISDYGLSQRLNIPRKEAAEFIRRYFESFPGVKQYMENIVKEAKQKGYVTTLLHRRRYLPDITSRNRNLRSFAERTAMNTPIQGSAADIIKKAMIDLADRLKREKLQARMLLQVHDELILEAPREEVERLQQIVPEVMENAIQLTVPLKVDYHYGPTWYDAK

SEQ ID NO: 81 - DNA, 1812 bp, synthetic construct
  misc_feature 1..1812: note = Variant of DNA polymerase
  source 1..1812: mol_type = other DNA
atgcatcaccatcaccatcacggtggcagcggtatggttgcaccacagaccaaaaaagaagaagccgtactgccgaacatcaattatacaattgtggaggaagtcaccgaaccgattctcgcggatcgttcggcgttagtggttgaggttctggggtccaactaccataaggctccgatcctgggctttgccctggccaatgaacacggtaacttcttcattcgcactgacacggctctttcttctccgctgtttaccgcgtggctggaggatgagagcaagaagaaatcagtattcgacggtaaacgcgcaatcgtggccctgaaatggaaaggcattgaattacgtggcatcgaatttgacttgttgctggcttcatatctcctgaatccctcgcaaagcacggaagatgtcgcaagcgtggccaagaccaaacagtacatggcagtacagagtgatgaggcagtctatggaaaaggtgcgaaacaaacggtgccagatgaaaacgttttagccgaacatctggtgcgtaaagctgctgcaattcgcgccctggagaaagaactgatccacgatttgcaggaaaatgaacaatacgccctgtttactgaccttgaattacctctgtcctcgattctggcagagatggaatttaccggtgtgaaagtagatgttgaacgcctgaaagaaatgggcgaggagctcacagaacaactgcgccaagtggagcaggaaatctataagttagctggccaagaattcaacattaacagccctaaacaactgggtgtcattctgtttgaaaaattacagcttcccgtcctgaagaagacgaagaccggctatagtacgagtgctgatgtgctcgagaaacttgccccgcagcatgaaatcgtcgcgaaaattcttcactaccgtcagctcggtaaactgcaatccacatatattgaagggctgctgaaagttgtacatcgcgacacccataaagtccacaccatcttcaaccaggccctgactcaaaccgggcgcctgtcaagcaccgaacctaatctccagaacatcccaattcgtctggaagaaggccgcaaaattcgccaagcatttgtgccatcggaacctgactgggttatctttagcgcagattactcacagattgagctccgtgttctcgcacacctggcaaacgatgaaaatctgatcgatgcttttcgtcatgaccttgacatccatacgaagacagccatggatattttccatgtaacagcagatgaagttacccccaatatgcgtcgccaagcaaaagccgtgaacttcggtattgtctatgggatctctgattacggtctgagtcagcgtcttaatatcccacgcaaagaagccgccgaatttattcgtcgttatttcgaaagctttcccggcgttaaacagtacatggagaatattgtacaggaagccaaacagaaaggatacgtcaccacccttttacaccgccgccgctatctgccagacatcacctctcgtaatttcaacttacgttcattcgcagaacgcacggccatgaacaccccaattcaaggatcagccgccgacatcatcaagaaggcaatgattgatttagctgatcgtctgaaacgcgagaaacttcaagctcgtatgctgctccaggttcatgacgaactgattcttgaagctcctcgtgaggaagtcgaacgcctgcagcagattgtacccgaggtcatggagaacgccatccagttaaccgtcccactgaaagttgattatcactacggtcctacgtggtacgacgctaag

SEQ ID NO: 82 - protein, 604 aa, synthetic construct
  REGION 1..604: note = Variant of DNA polymerase
MHHHHHHGGSGMVAPQTKKEEAVLPNINYTIVEEVTEPILADRSALVVEVLGSNYHKAPILGFALANEHGNFFIRTDTALSSPLFTAWLEDESKKKSVFDGKRAIVALKWKGIELRGIEFDLLLASYLLNPSQSTEDVASVAKTKQYMAVQSDEAVYGKGAKQTVPDENVLAEHLVRKAAAIRALEKELIHDLQENEQYALFTDLELPLSSILAEMEFTGVKVDVERLKEMGEELTEQLRQVEQEIYKLAGQEFNINSPKQLGVILFEKLQLPVLKKTKTGYSTSADVLEKLAPQHEIVAKILHYRQLGKLQSTYIEGLLKVVHRDTHKVHTIFNQALTQTGRLSSTEPNLQNIPIRLEEGRKIRQAFVPSEPDWVIFSADYSQIELRVLAHLANDENLIDAFRHDLDIHTKTAMDIFHVTADEVTPNMRRQAKAVNFGIVYGISDYGLSQRLNIPRKEAAEFIRRYFESFPGVKQYMENIVQEAKQKGYVTTLLHRRRYLPDITSRNFNLRSFAERTAMNTPIQGSAADIIKKAMIDLADRLKREKLQARMLLQVHDELILEAPREEVERLQQIVPEVMENAIQLTVPLKVDYHYGPTWYDAK

SEQ ID NO: 83 - DNA, 1812 bp, synthetic construct
  misc_feature 1..1812: note = Variant of DNA polymerase
  source 1..1812: mol_type = other DNA
atgcatcaccatcaccatcacggtggcagcggtatggttgcaccacagaccaaaaaagaagaagccgtactgccgaacatcaattatacaattgtggaggaagtcaccgaaccgattctcgcggatcgttcggcgttagtggttgaggttctggagtccaactaccataaggctccgatcctgggctttgccctggccaatgaacacggtaacttcttcattcgcactgacacggctctttcttctccgctgtttaccgcgtggctggaggatgagagcaagaagaaatcagtattcgacggtaaacgcgcaatcgtggccctgaaatggaaaggcattgaattacgtggcatcgaatttgacttgttgatcgcttcatatctcctgaatccctcgcaaagcacggaagatgtcgcaagcgtggccaagaccaaacagtacatggcagtacagagtgattgggcagtctatggaaaaggtgcgaaacaaacggtgccagatgaaaacgttttagccgaacatctggtgcgtaaagctgctgcaattcgcgccctggagaaagaactgatccacgatttgcaggaaaatgaacaatacgccctgtttactgaccttgaattacctctgtcctcggtcctggcagagatggaatttaccggtgtgaaagtagatgttgaacgcctgaaagaaatgggcgaggagctcacagaacaactgcgccaagtggagcaggaaatctataagttagctggccaagaattcaacattaacagccctaaacaactgggtgtcattctgtttgaaaaattacagcttcccgtcctgaagaagacgaagaccggctatagtacgagtgctgatgtgctcgagaaacttgcccgtcagcatgaaatcgtcgggaaaattcttcactaccgtcagctcggtaaactgcaatccacatatattgaagggctgctgaaagttgtacatcgcgacacccataaagtccacaccatcttcaaccaggccctgactcaaaccgggcgcctgtcaagcaccgaacctaatctccagaacatcccaattcgtctggaagaaggccgcaaaattcgccaagcatttgtgccatcgaaacctgactgggttatctttagcgcagattactcacagattgagctccgtgttctcgcacacctggcaaacgatgaaaatctgatcgatgcttttcgtcatgaccttgacatccatacgaagacagccatggatattttccatgtaacagcagatgaagttacccccaatatgcgtcgccaagcaaaagccgtgaacttcggtattgtctatgggatctctgattacggtctgagtcagcgtcttaatatcccacgcaaagaagccgccgaatttattcgtcgttatttcgaaagctttcccggcgttaaacagtacatggagaatattgtaaaagaagccaaacagaaaggatacgtcaccacccttttacaccgccgccgctatctgccagacatcacctctcgtaatcgtaacttacgttcattcgcagaacgcacggccatgaacaccccaattcaaggatcagccgccgacatcatcaagaaggcaatgattgatttagctgatcgtctgaaacgcgagaaacttcaagctcgtatgctgctccaggttcatgacgaactgattcttgaagctcctcgtgaggaagtcgaacgcctgcagcagattgtacccgaggtcatggagaacgccatccagttaaccgtcccactgaaagttgattatcactacggtcctacgtggtacgacgctaag

SEQ ID NO: 84 - protein, 604 aa, synthetic construct
  REGION 1..604: note = Variant of DNA polymerase
MHHHHHHGGSGMVAPQTKKEEAVLPNINYTIVEEVTEPILADRSALVVEVLESNYHKAPILGFALANEHGNFFIRTDTALSSPLFTAWLEDESKKKSVFDGKRAIVALKWKGIELRGIEFDLLIASYLLNPSQSTEDVASVAKTKQYMAVQSDWAVYGKGAKQTVPDENVLAEHLVRKAAAIRALEKELIHDLQENEQYALFTDLELPLSSVLAEMEFTGVKVDVERLKEMGEELTEQLRQVEQEIYKLAGQEFNINSPKQLGVILFEKLQLPVLKKTKTGYSTSADVLEKLARQHEIVGKILHYRQLGKLQSTYIEGLLKVVHRDTHKVHTIFNQALTQTGRLSSTEPNLQNIPIRLEEGRKIRQAFVPSKPDWVIFSADYSQIELRVLAHLANDENLIDAFRHDLDIHTKTAMDIFHVTADEVTPNMRRQAKAVNFGIVYGISDYGLSQRLNIPRKEAAEFIRRYFESFPGVKQYMENIVKEAKQKGYVTTLLHRRRYLPDITSRNRNLRSFAERTAMNTPIQGSAADIIKKAMIDLADRLKREKLQARMLLQVHDELILEAPREEVERLQQIVPEVMENAIQLTVPLKVDYHYGPTWYDAK

SEQ ID NO: 85 - DNA, 1812 bp, synthetic construct
  misc_feature 1..1812: note = Variant of DNA polymerase
  source 1..1812: mol_type = other DNA
atgcatcaccatcaccatcacggtggcagcggtatggttgcaccacagaccaaaaaagaagaagccgtactgccgaacatcaattatacaattgtggaggaagtcaccgaaccgattctcgcggatcgttcggcgttagtggttgaggttctggggtccaactaccataaggctccgatcctgggctttgccctggccaatgaacacggtaacttcttcattcgcactgacacggctctttcttctccgctgtttaccgcgtggctggaggatgagagcaagaagaaatcagtattcgacgctaaacgcgcaatcgtggccctgaaatggaaaggcattgaattacgtggcatcgaatttgacttgttgatcgcttcatatctcctgaatccctcgcaaagcacggaagatgtcgcaagcgtggccaagaccaaacagtacatggcagtacagagtgattgggcagtctatggaaaaggtgcgaaacaaacggtgccagatgaaaacgttttagccgaacatctggtgcgtaaagctgctgcaattcgcgccctggagaaagaactgatccacgatttgcaggaaaatgaacaatacgccctgtttactgaccttgaattacctctgtcctcgattctggcagagatggaatttaccggtgtgaaagtagatgttgaacgcctgaaagaaatgggcgaggagctcacagaacaactgcgccaagtggagcaggaaatctataagttagctggccaagaattcaacattaacagccctaaacaactgggtgtcattctgtttgaaaaattacagcttcccgtcctgaagaagacgaagaccggctatagtacgagtgctgatgtgctcgagaaacttgcccgtcagcatgaaatcgtccgcaaaattcttcactaccgtcagctcggtaaactgcaatccacatatattgaagggctgctgaaagttgtacatcgcgacacccataaagtccacaccatcttcaaccaggccctgactcaaaccgggcgcctgtcaagcaccgaacctaatctccagaacatcccaattcgtctggaagaaggccgcaaaattcgccaagcatttgtgccatcggaacctgactgggttatctttagcgcagattactcacagattgagctccgtgttctcgcacacattgcaaacgatgaaaatctgatcgatgcttttcgtcatgaccttgacatccatacgaagacagccatggatattttccatgtaacagcagatgaagttacccccaatatgcgtcgccaagcaaaagccgtgaacttcggtattgtctatgggatctctgattacggtctgagtcagagtcttaatatcccacgcaaagaagccgccgaatttattcgtcgttatttcgaaagctttcccggcgttaaacagtacatggagaatattgtacaagaagccaaacagaaaggatacgtcaccacccttttacaccgccgccgctatctgccagacatcacctctcgtaatcgtaacttacgttcattcgcagaacgcacggccatgaacaccccaattcaaggatcagccgccgacatcatcaagaaggcaatgattgatttagctgatcgtctgaaacgcgagaaacttcaagctcgtatgctgctccaggttcatgacgaactgattcttgaagctcctcgtgaggaagtcgaacgcctgcagcagattgtacccgaggtcatggagaacgccatccagttaaccgtcccactgaaagttagctatcactacggtcctacgtggtacgacgctaag

SEQ ID NO: 86 - protein, 604 aa, synthetic construct
  REGION 1..604: note = Variant of DNA polymerase
MHHHHHHGGSGMVAPQTKKEEAVLPNINYTIVEEVTEPILADRSALVVEVLGSNYHKAPILGFALANEHGNFFIRTDTALSSPLFTAWLEDESKKKSVFDAKRAIVALKWKGIELRGIEFDLLIASYLLNPSQSTEDVASVAKTKQYMAVQSDWAVYGKGAKQTVPDENVLAEHLVRKAAAIRALEKELIHDLQENEQYALFTDLELPLSSILAEMEFTGVKVDVERLKEMGEELTEQLRQVEQEIYKLAGQEFNINSPKQLGVILFEKLQLPVLKKTKTGYSTSADVLEKLARQHEIVRKILHYRQLGKLQSTYIEGLLKVVHRDTHKVHTIFNQALTQTGRLSSTEPNLQNIPIRLEEGRKIRQAFVPSEPDWVIFSADYSQIELRVLAHIANDENLIDAFRHDLDIHTKTAMDIFHVTADEVTPNMRRQAKAVNFGIVYGISDYGLSQSLNIPRKEAAEFIRRYFESFPGVKQYMENIVQEAKQKGYVTTLLHRRRYLPDITSRNRNLRSFAERTAMNTPIQGSAADIIKKAMIDLADRLKREKLQARMLLQVHDELILEAPREEVERLQQIVPEVMENAIQLTVPLKVSYHYGPTWYDAK

SEQ ID NO: 87 - DNA, 1812 bp, synthetic construct
  misc_feature 1..1812: note = Variant of DNA polymerase
  source 1..1812: mol_type = other DNA
atgcatcaccatcaccatcacggtggcagcggtatggttgcaccacagaccaaaaaagaagaagccgtactgccgaacatcaattatacaattgtggaggaagtcaccgaaccgattctcgcggatcgttcggcgttagtggttgaggttctggggtccaactaccataaggctccgatcctgggctttgccctggccaatgaacacggtaacttcttcattcgcactgacacggctctttcttctccgctgtttaccgcgtggctggaggatgagagcaagaagaaatcagtattcgacggtaaacgcgcaatcgtggccctgaaatggaaaggcattgaattacgtggcatcgaatttgacttgttgatcgcttcatatctcctgaatccctcgcaaagcacggaagatgtcgcaagcgtggccaagaccaaacagtacatggcagtacagagtgattgggcagtctatggaaaaggtgcgaaacaaacggtgccagatgaaaacgttttagccgaacatctggtgcgtaaagctgctgcaattcgcgccctggagaaagaactgatccacgatttgcaggaaaatgaacaatacgccctgtttactgaccttgaattacctctgtcctcggtcctggcagagatggaatttaccggtgtgaaagtagatgttgaacgcctgaaagaaatgggcgaggagctcacagaacaactgcgccaagtggagcaggaaatctataagttagctggccaagaattcaacattaacagccctaaacaactgggtgtcattctgtttgaaaaattacagcttcccgtcctgaagaagacgaagaccggctatagtacgagtgctgatgtgctcgagaaacttgcccgtcagcatgaaatcgtcgggaaaattcttcactaccgtcagctcggtaaactgcaatccacatatattgaagggctgctgaaagttgtacatcgcgacacccataaagtccacaccatcttcaaccaggccctgactcaaaccgggcgcctgtcaagcaccgaacctaatctccagaacatcccaattcgtctggaagaaggccgcaaaattcgccaagcatttgtgccatcggaacctgactgggttatctttagcgcagattactcacagattgagctccgtgttctcgcacacctggcaaacgatgaaaatctgatcgatgcttttcgtcatgaccttgacatccatacgaagacagccatggatattttccatgtaacagcagatgaagttacccccaatatgcgtcgccaagcaaaagccgtgaacttcggtattgtctatgggatctctgattacggtctgagtcagcgtcttaatatcccacgcaaagaagccgccgaatttattcgtcgttatttcgaaagctttcccggcgttaaacagtacatggagaatattgtacaagaagccaaacagaaaggatacgtcaccacccttttacaccgccgccgctatctgccagacatcacctctcgtaatttcaacttacgttcattcgcagaacgcacggccatgaacaccccaattcaaggatcagccgccgacatcatcaagaaggcaatgattgatttagctgatcgtctgaaacgcgagaaacttcaagctcgtatgctgctccaggttcatgacgaactgattcttgaagctcctcgtgaggaagtcgaacgcctgcagcagattgtacccgaggtcatggagaacgccatccagttaaccgtcccactgaaagttgattatcactacggtcctacgtggtacgacgctaag

SEQ ID NO: 88 - protein, 604 aa, synthetic construct
  REGION 1..604: note = Variant of DNA polymerase
MHHHHHHGGSGMVAPQTKKEEAVLPNINYTIVEEVTEPILADRSALVVEVLGSNYHKAPILGFALANEHGNFFIRTDTALSSPLFTAWLEDESKKKSVFDGKRAIVALKWKGIELRGIEFDLLIASYLLNPSQSTEDVASVAKTKQYMAVQSDWAVYGKGAKQTVPDENVLAEHLVRKAAAIRALEKELIHDLQENEQYALFTDLELPLSSVLAEMEFTGVKVDVERLKEMGEELTEQLRQVEQEIYKLAGQEFNINSPKQLGVILFEKLQLPVLKKTKTGYSTSADVLEKLARQHEIVGKILHYRQLGKLQSTYIEGLLKVVHRDTHKVHTIFNQALTQTGRLSSTEPNLQNIPIRLEEGRKIRQAFVPSEPDWVIFSADYSQIELRVLAHLANDENLIDAFRHDLDIHTKTAMDIFHVTADEVTPNMRRQAKAVNFGIVYGISDYGLSQRLNIPRKEAAEFIRRYFESFPGVKQYMENIVQEAKQKGYVTTLLHRRRYLPDITSRNFNLRSFAERTAMNTPIQGSAADIIKKAMIDLADRLKREKLQARMLLQVHDELILEAPREEVERLQQIVPEVMENAIQLTVPLKVDYHYGPTWYDAK

SEQ ID NO: 89 - DNA, 1812 bp, synthetic construct
  misc_feature 1..1812: note = Variant of DNA polymerase
  source 1..1812: mol_type = other DNA
atgcatcaccatcaccatcacggtggcagcggtatggttgcaccacagaccaaaaaagaagaagccgtactgccgaacatcaattatacaattgtggaggaagtcaccgaaccgattctcgcggatcgttcggcgttagtggttgaggttctggagtccaactaccataaggctccgatcctgggctttgccctggccaatgaacacggtaacttcttcattcgcactgacacggctctttcttctccgctgtttaccgcgtggctggaggatgagagcaagaagaaatcagtattcgacggtaaacgcgcaatcgtggccctgaaatggaaaggcattgaattacgtggcatcgaatttgacttgttgattgcttcatatctcctgaatccctcgcaaagcacggaagatgtcgcaagcgtggccaagaccaaacagtacatggcagtacagagtgatgaggcagtctatggaaaaggtgcgaaacaaacggtgccagatgaaaacgttttagccgaacatctggtgcgtaaagctgctgcaattcgcgccctggagaaagaactgatccacgatttgcaggaaaatgaacaatacgccctgtttactgaccttgaattacctctgtcctcggtcctggcagagatggaatttaccggtgtgaaagtagatgttgaacgcctgaaagaaatgggcgaggagctcacagaacaactgcgccaagtggagcaggaaatctataagttagctggccaagaattcaacattaacagccctaaacaactgggtgtcattctgtttgaaaaattacagcttcccgtcctgaagaagacgaagaccggctatagtacgagtgctgatgtgctcgagaaacttgccccgcagcatgaaatcgtccgcaaaattcttcactaccgtcagctcggtaaactgcaatccacatatattgaagggctgctgaaagttgtacatcgcgacacccataaagtccacaccatcttcaaccaggccctgactcaaaccgggcgcctgtcaagcaccgaacctaatctccagaacatcccaattcgtctggaagaaggccgcaaaattcgccaagcatttgtgccatcggaacctgactgggttatctttagcgcagattactcacagattgagctccgtgttctcgcacacctggcaaacgatgaaaatctgatcgatgcttttcgtcatgaccttgacatccatacgaagacagccatggatattttccatgtaacagcagatgaagttacccccaatatgcgtcgccaagcaaaagccgtgaacttcggtattgtctatgggatctctgattacggtctgagtcagcgtcttaatatcccacgcaaagaagccgccgaatttattcgtcgttatttcgaaagctttcccggcgttaaacagtacatggagaatattgtacaggaagccaaacagaaaggatacgtcaccacccttttacaccgccgccgctatctgccagacatcacctctcgtaatcgtaacttacgttcattcgcagaacgcacggccatgaacaccccaattcaaggatcagccgccgacatcatcaagaaggcaatgattgatttagctgatcgtctgaaacgcgagaaacttcaagctcgtatgctgctccaggttcatgacgaactgattcttgaagctcctcgtgaggaagtcgaacgcctgcagcagattgtacccgaggtcatggagaacgccatccagttaaccgtcccactgaaagttgattatcactacggtcctacgtggtacgacgctaag

SEQ ID NO: 90 - protein, 604 aa, synthetic construct
  REGION 1..604: note = Variant of DNA polymerase
MHHHHHHGGSGMVAPQTKKEEAVLPNINYTIVEEVTEPILADRSALVVEVLESNYHKAPILGFALANEHGNFFIRTDTALSSPLFTAWLEDESKKKSVFDGKRAIVALKWKGIELRGIEFDLLIASYLLNPSQSTEDVASVAKTKQYMAVQSDEAVYGKGAKQTVPDENVLAEHLVRKAAAIRALEKELIHDLQENEQYALFTDLELPLSSVLAEMEFTGVKVDVERLKEMGEELTEQLRQVEQEIYKLAGQEFNINSPKQLGVILFEKLQLPVLKKTKTGYSTSADVLEKLAPQHEIVRKILHYRQLGKLQSTYIEGLLKVVHRDTHKVHTIFNQALTQTGRLSSTEPNLQNIPIRLEEGRKIRQAFVPSEPDWVIFSADYSQIELRVLAHLANDENLIDAFRHDLDIHTKTAMDIFHVTADEVTPNMRRQAKAVNFGIVYGISDYGLSQRLNIPRKEAAEFIRRYFESFPGVKQYMENIVQEAKQKGYVTTLLHRRRYLPDITSRNRNLRSFAERTAMNTPIQGSAADIIKKAMIDLADRLKREKLQARMLLQVHDELILEAPREEVERLQQIVPEVMENAIQLTVPLKVDYHYGPTWYDAK

SEQ ID NO: 91 - DNA, 1812 bp, synthetic construct
  misc_feature 1..1812: note = Variant of DNA polymerase
  source 1..1812: mol_type = other DNA
atgcatcaccatcaccatcacggtggcagcggtatggttgcaccacagaccaaaaaagaagaagccgtactgccgaacatcaattatacaattgtggaggaagtcaccgaaccgattctcgcggatcgttcggcgttagtggttgaggttctggggtccaactaccataaggctccgatcctgggctttgccctggccaatgaacacggtaacttcttcattcgcactgacacggctctttcttctccgctgtttaccgcgtggctggaggatgagagcaagaagaaatcagtattcgacgctaaacgcgcaatcgtggccctgaaatggaaaggcattgaattacgtggcatcgaatttgacttgttgattgcttcatatctcctgaatccctcgcaaagcacggaagatgtcgcaagcgtggccaagaccaaacagtacatggcagtacagagtgatgaggcagtctatggaaaaggtgcgaaacaaacggtgccagatgaaaacgttttagccgaacatctggtgcgtaaagctgctgcaattcgcgccctggagaaagaactgatccacgatttgcaggaaaatgaacaatacgccctgtttactgaccttgaattacctctgtcctcggtcctggcagagatggaatttaccggtgtgaaagtagatgttgaacgcctgaaagaaatgggcgaggagctcacagaacaactgcgccaagtggagcaggaaatctataagttagctggccaagaattcaacattaacagccctaaacaactgggtgtcattctgtttgaaaaattacagcttcccgtcctgaagaagacgaagaccggctatagtacgagtgctgatgtgctcgagaaacttgcccgtcagcatgaaatcgtccgcaaaattcttcactaccgtcagctcggtaaactgcaatccacatatattgaagggctgctgaaagttgtacatcgcgacacccataaagtccacaccatcttcaaccaggccctgactcaaaccgggcgcctgtcaagcaccgaacctaatctccagaacatcccaattcgtctggaagaaggccgcaaaattcgccaagcatttgtgccatcggaacctgactgggttatctttagcgcagattactcacagattgagctccgtgttctcgcacacctggcaaacgatgaaaatctgatcgatgcttttcgtcatgaccttgacatccatacgaagacagccatggatattttccatgtaacagcagatgaagttacccccaatatgcgtcgccaagcaaaagccgtgaacttcggtattgtctatgggatctctgattacggtctgagtcagcgtcttaatatcccacgcaaagaagccgccgaatttattcgtcgttatttcgaaagctttcccggcgttaaacagtacatggagaatattgtaaaagaagccaaacagaaaggatacgtcaccacccttttacaccgccgccgctatctgccagacatcacctctcgtaatcgtaacttacgttcattcgcagaacgcacggccatgaacaccccaattcaaggatcagccgccgacatcatcaagaaggcaatgattgatttagctgatcgtctgaaacgcgagaaacttcaagctcgtatgctgctccaggttcatgacgaactgattcttgaagctcctcgtgaggaagtcgaacgcctgcagcagattgtacccgaggtcatggagaacgccatccagttaaccgtcccactgaaagttagctatcactacggtcctacgtggtacgacgctaag

SEQ ID NO: 92 - protein, 604 aa, synthetic construct
  REGION 1..604: note = Variant of DNA polymerase
MHHHHHHGGSGMVAPQTKKEEAVLPNINYTIVEEVTEPILADRSALVVEVLGSNYHKAPILGFALANEHGNFFIRTDTALSSPLFTAWLEDESKKKSVFDAKRAIVALKWKGIELRGIEFDLLIASYLLNPSQSTEDVASVAKTKQYMAVQSDEAVYGKGAKQTVPDENVLAEHLVRKAAAIRALEKELIHDLQENEQYALFTDLELPLSSVLAEMEFTGVKVDVERLKEMGEELTEQLRQVEQEIYKLAGQEFNINSPKQLGVILFEKLQLPVLKKTKTGYSTSADVLEKLARQHEIVRKILHYRQLGKLQSTYIEGLLKVVHRDTHKVHTIFNQALTQTGRLSSTEPNLQNIPIRLEEGRKIRQAFVPSEPDWVIFSADYSQIELRVLAHLANDENLIDAFRHDLDIHTKTAMDIFHVTADEVTPNMRRQAKAVNFGIVYGISDYGLSQRLNIPRKEAAEFIRRYFESFPGVKQYMENIVKEAKQKGYVTTLLHRRRYLPDITSRNRNLRSFAERTAMNTPIQGSAADIIKKAMIDLADRLKREKLQARMLLQVHDELILEAPREEVERLQQIVPEVMENAIQLTVPLKVSYHYGPTWYDAK

SEQ ID NO: 93 - DNA, 1812 bp, synthetic construct
  misc_feature 1..1812: note = Variant of DNA polymerase
  source 1..1812: mol_type = other DNA
atgcatcaccatcaccatcacggtggcagcggtatggttgcaccacagaccaaaaaagaagaagccgtactgccgaacatcaattatacaattgtggaggaagtcaccgaaccgattctcgcggatcgttcggcgttagtggttgaggttctggggtccaactaccataaggctccgatcctgggctttgccctggccaatgaacacggtaacttcttcattcgcactgacacggctctttcttctccgctgtttaccgcgtggctggaggatgagagcaagaagaaatcagtattcgacggtaaacgcgcaatcgtggccctgaaatggaaaggcattgaattacgtggcatcgaatttgacttgttgctggcttcatatctcctgaatccctcgcaaagcacggaagatgtcgcaagcgtggccaagaccaaacagtacatggcagtacagagtgatgaggcagtctatggaaaaggtgcgaaacaaacggtgccagatgaaaacgttttagccgaacatctggtgcgtaaagctgctgcaattcgcgccctggagaaagaactgatccacgatttgcaggaaaatgaacaatacgccctgtttactgaccttgaattacctctgtcctcgattctggcagagatggaatttaccggtgtgaaagtagatgttgaacgcctgaaagaaatgggcgaggagctcacagaacaactgcgccaagtggagcaggaaatctataagttagctggccaagaattcaacattaacagccctaaacaactgggtgtcattctgtttgaaaaattacagcttcccgtcctgaagaagacgaagaccggctatagtacgagtgctgatgtgctcgagaaacttgcccgtcagcatgaaatcgtccgcaaaattcttcactaccgtcagctcggtaaactgcaatccacatatattgaagggctgctgaaagttgtacatcgcgacacccataaagtccacaccatcttcaaccaggccctgactcaaaccgggcgcctgtcaagcaccgaacctaatctccagaacatcccaattcgtctggaagaaggccgcaaaattcgccaagcatttgtgccatcggaacctgactgggttatctttagcgcagattactcacagattgagctccgtgttctcgcacacattgcaaacgatgaaaatctgatcgatgcttttcgtcatgaccttgacatccatacgaagacagccatggatattttccatgtaacagcagatgaagttacccccaatatgcgtcgccaagcaaaagccgtgaacttcggtattgtctatgggatctctgattacggtctgagtcagagtcttaatatcccacgcaaagaagccgccgaatttattcgtcgttatttcgaaagctttcccggcgttaaacagtacatggagaatattgtacaagaagccaaacagaaaggatacgtcaccacccttttacaccgccgccgctatctgccagacatcacctctcgtaatcgtaacttacgttcattcgcagaacgcacggccatgaacaccccaattcaaggatcagccgccgacatcatcaagaaggcaatgattgatttagctgatcgtctgaaacgcgagaaacttcaagctcgtatgctgctccaggttcatgacgaactgattcttgaagctcctcgtgaggaagtcgaacgcctgcagcagattgtacccgaggtcatggagaacgccatccagttaaccgtcccactgaaagttgattatcactacggtcctacgtggtacgacgctaag

SEQ ID NO: 94 - protein, 604 aa, synthetic construct
  REGION 1..604: note = Variant of DNA polymerase
MHHHHHHGGSGMVAPQTKKEEAVLPNINYTIVEEVTEPILADRSALVVEVLGSNYHKAPILGFALANEHGNFFIRTDTALSSPLFTAWLEDESKKKSVFDGKRAIVALKWKGIELRGIEFDLLLASYLLNPSQSTEDVASVAKTKQYMAVQSDEAVYGKGAKQTVPDENVLAEHLVRKAAAIRALEKELIHDLQENEQYALFTDLELPLSSILAEMEFTGVKVDVERLKEMGEELTEQLRQVEQEIYKLAGQEFNINSPKQLGVILFEKLQLPVLKKTKTGYSTSADVLEKLARQHEIVRKILHYRQLGKLQSTYIEGLLKVVHRDTHKVHTIFNQALTQTGRLSSTEPNLQNIPIRLEEGRKIRQAFVPSEPDWVIFSADYSQIELRVLAHIANDENLIDAFRHDLDIHTKTAMDIFHVTADEVTPNMRRQAKAVNFGIVYGISDYGLSQSLNIPRKEAAEFIRRYFESFPGVKQYMENIVQEAKQKGYVTTLLHRRRYLPDITSRNRNLRSFAERTAMNTPIQGSAADIIKKAMIDLADRLKREKLQARMLLQVHDELILEAPREEVERLQQIVPEVMENAIQLTVPLKVDYHYGPTWYDAK

SEQ ID NO: 95 - DNA, 1812 bp, synthetic construct
  misc_feature 1..1812: note = Variant of DNA polymerase
  source 1..1812: mol_type = other DNA
atgcatcaccatcaccatcacggtggcagcggtatggttgcaccacagaccaaaaaagaagaagccgtactgccgaacatcaattatacaattgtggaggaagtcaccgaaccgattctcgcggatcgttcggcgttagtggttgaggttctggagtccaactaccataaggctccgatcctgggctttgccctggccaatgaacacggtaacttcttcattcgcactgacacggctctttcttctccgctgtttaccgcgtggctggaggatgagagcaagaagaaatcagtattcgacggtaaacgcgcaatcgtggccctgaaatggaaaggcattgaattacgtggcatcgaatttgacttgttgctggcttcatatctcctgaatccctcgcaaagcacggaagatgtcgcaagcgtggccaagaccaaacagtacatggcagtacagagtgatgaggcagtctatggaaaaggtgcgaaacaaacggtgccagatgaaaacgttttagccgaacatctggtgcgtaaagctgctgcaattcgcgccctggagaaagaactgatccacgatttgcaggaaaatgaacaatacgccctgtttactgaccttgaattacctctgtcctcgattctggcagagatggaatttaccggtgtgaaagtagatgttgaacgcctgaaagaaatgggcgaggagctcacagaacaactgcgccaagtggagcaggaaatctataagttagctggccaagaattcaacattaacagccctaaacaactgggtgtcattctgtttgaaaaattacagcttcccgtcctgaagaagacgaagaccggctatagtacgagtgctgatgtgctcgagaaacttgcccctcagcatgaaatcgtccgcaaaattcttcactaccgtcagctcggtaaactgcaatccacatatattgaagggctgctgaaagttgtacatcgcgacacccataaagtccacaccatcttcaaccaggccctgactcaaaccgggcgcctgtcaagcaccgaacctaatctccagaacatcccaattcgtctggaagaaggccgcaaaattcgccaagcatttgtgccatcggaacctgactgggttatctttagcgcagattactcacagattgagctccgtgttctcgcacacctggcaaacgatgaaaatctgatcgatgcttttcgtcatgaccttgacatccatacgaagacagccatggatattttccatgtaacagcagatgaagttacccccaatatgcgtcgccaagcaaaagccgtgaacttcggtattgtctatgggatctctgattacggtctgagtcagcgtcttaatatcccacgcaaagaagccgccgaatttattcgtcgttatttcgaaagctttcccggcgttaaacagtacatggagaatattgtaaaagaagccaaacagaaaggatacgtcaccacccttttacaccgccgccgctatctgccagacatcacctctcgtaatcgtaacttacgttcattcgcagaacgcacggccatgaacaccccaattcaaggatcagccgccgacatcatcaagaaggcaatgattgatttagctgatcgtctgaaacgcgagaaacttcaagctcgtatgctgctccaggttcatgacgaactgattcttgaagctcctcgtgaggaagtcgaacgcctgcagcagattgtacccgaggtcatggagaacgccatccagttaaccgtcccactgaaagttagctatcactacggtcctacgtggtacgacgctaag

SEQ ID NO: 96 - protein, 604 aa, synthetic construct
  REGION 1..604: note = Variant of DNA polymerase
MHHHHHHGGSGMVAPQTKKEEAVLPNINYTIVEEVTEPILADRSALVVEVLESNYHKAPILGFALANEHGNFFIRTDTALSSPLFTAWLEDESKKKSVFDGKRAIVALKWKGIELRGIEFDLLLASYLLNPSQSTEDVASVAKTKQYMAVQSDEAVYGKGAKQTVPDENVLAEHLVRKAAAIRALEKELIHDLQENEQYALFTDLELPLSSILAEMEFTGVKVDVERLKEMGEELTEQLRQVEQEIYKLAGQEFNINSPKQLGVILFEKLQLPVLKKTKTGYSTSADVLEKLAPQHEIVRKILHYRQLGKLQSTYIEGLLKVVHRDTHKVHTIFNQALTQTGRLSSTEPNLQNIPIRLEEGRKIRQAFVPSEPDWVIFSADYSQIELRVLAHLANDENLIDAFRHDLDIHTKTAMDIFHVTADEVTPNMRRQAKAVNFGIVYGISDYGLSQRLNIPRKEAAEFIRRYFESFPGVKQYMENIVKEAKQKGYVTTLLHRRRYLPDITSRNRNLRSFAERTAMNTPIQGSAADIIKKAMIDLADRLKREKLQARMLLQVHDELILEAPREEVERLQQIVPEVMENAIQLTVPLKVSYHYGPTWYDAK

SEQ ID NO: 97 - DNA, 1812 bp, synthetic construct
  misc_feature 1..1812: note = Variant of DNA polymerase
  source 1..1812: mol_type = other DNA
atgcatcaccatcaccatcacggtggcagcggtatggttgcaccacagaccaaaaaagaagaagccgtactgccgaacatcaattatacaattgtggaggaagtcaccgaaccgattctcgcggatcgttcggcgttagtggttgaggttctggagtccaactaccataaggctccgatcctgggctttgccctggccaatgaacacggtaacttcttcattcgcactgacacggctctttcttctccgctgtttaccgcgtggctggaggatgagagcaagaagaaatcagtattcgacgctaaacgcgcaatcgtggccctgaaatggaaaggcattgaattacgtggcatcgaatttgacttgttgctggcttcatatctcctgaatccctcgcaaagcacggaagatgtcgcaagcgtggccaagaccaaacagtacatggcagtacagagtgatgaagcagtctatggaaaaggtgcgaaacaaacggtgccagatgaaaacgttttagccgaacatctggtgcgtaaagctgctgcaattcgcgccctggagaaagaactgatccacgatttgcaggaaaatgaacaatacgccctgtttactgaccttgaattacctctgtcctcggtcctggcagagatggaatttaccggtgtgaaagtagatgttgaacgcctgaaagaaatgggcgaggagctcacagaacaactgcgccaagtggagcaggaaatctataagttagctggccaagaattcaacattaacagccctaaacaactgggtgtcattctgtttgaaaaattacagcttcccgtcctgaagaagacgaagaccggctatagtacgagtgctgatgtgctcgagaaacttgcccctcagcatgaaatcgtcgagaaaattcttcactaccgtcagctcggtaaactgcaatccacatatattgaagggctgctgaaagttgtacatcgcgacacccataaagtccacaccatcttcaaccaggccctgactcaaaccgggcgcctgtcaagcaccgaacctaatctccagaacatcccaattcgtctggaagaaggccgcaaaattcgccaagcatttgtgccatcggaacctgactgggttatctttagcgcagattactcacagattgagctccgtgttctcgcacacattgcaaacgatgaaaatctgatcgatgcttttcgtcatgaccttgacatccatacgaagacagccatggatattttccatgtaacagcagatgaagttacccccaatatgcgtcgccaagcaaaagccgtgaacttcggtattgtctatgggatctctgattacggtctgagtcagcgtcttaatatcccacgcaaagaagccgccgaatttattcgtcgttatttcgaaagctttcccggcgttaaacagtacatggagaatattgtaaaagaagccaaacagaaaggatacgtcaccacccttttacaccgccgccgctatctgccagacatcacctctcgtaatcgtaacttacgttcattcgcagaacgcacggccatgaacaccccaattcaaggatcagccgccgacatcatcaagaaggcaatgattgatttagctgatcgtctgaaacgcgagaaacttcaagctcgtatgctgctccaggttcatgacgaactgattcttgaagctcctcgtgaggaagtcgaacgcctgcagcagattgtacccgaggtcatggagaacgccatccagttaaccgtcccactgaaagttgattatcactacggtcctacgtggtacgacgctaag

SEQ ID NO: 98 - protein, 604 aa, synthetic construct
  REGION 1..604: note = Variant of DNA polymerase
MHHHHHHGGSGMVAPQTKKEEAVLPNINYTIVEEVTEPILADRSALVVEVLESNYHKAPILGFALANEHGNFFIRTDTALSSPLFTAWLEDESKKKSVFDAKRAIVALKWKGIELRGIEFDLLLASYLLNPSQSTEDVASVAKTKQYMAVQSDEAVYGKGAKQTVPDENVLAEHLVRKAAAIRALEKELIHDLQENEQYALFTDLELPLSSVLAEMEFTGVKVDVERLKEMGEELTEQLRQVEQEIYKLAGQEFNINSPKQLGVILFEKLQLPVLKKTKTGYSTSADVLEKLAPQHEIVEKILHYRQLGKLQSTYIEGLLKVVHRDTHKVHTIFNQALTQTGRLSSTEPNLQNIPIRLEEGRKIRQAFVPSEPDWVIFSADYSQIELRVLAHIANDENLIDAFRHDLDIHTKTAMDIFHVTADEVTPNMRRQAKAVNFGIVYGISDYGLSQRLNIPRKEAAEFIRRYFESFPGVKQYMENIVKEAKQKGYVTTLLHRRRYLPDITSRNRNLRSFAERTAMNTPIQGSAADIIKKAMIDLADRLKREKLQARMLLQVHDELILEAPREEVERLQQIVPEVMENAIQLTVPLKVDYHYGPTWYDAK

SEQ ID NO: 99 - DNA, 1812 bp, synthetic construct
  misc_feature 1..1812: note = Variant of DNA polymerase
  source 1..1812: mol_type = other DNA
atgcatcaccatcaccatcacggtggcagcggtatggttgcaccacagaccaaaaaagaagaagccgtactgccgaacatcaattatacaattgtggaggaagtcaccgaaccgattctcgcggatcgttcggcgttagtggttgaggttctggggtccaactaccataaggctccgatcctgggctttgccctggccaatgaacacggtaacttcttcattcgcactgacacggctctttcttctccgctgtttaccgcgtggctggaggatgagagcaagaagaaatcagtattcgacggtaaacgcgcaatcgtggccctgaaatggaaaggcattgaattacgtggcatcgaatttgacttgttgatcgcttcatatctcctgaatccctcgcaaagcacggaagatgtcgcaagcgtggccaagaccaaacagtacatggcagtacagagtgatgaagcagtctatggaaaaggtgcgaaacaaacggtgccagatgaaaacgttttagccgaacatctggtgcgtaaagctgctgcaattcgcgccctggagaaagaactgatccacgatttgcaggaaaatgaacaatacgccctgtttactgaccttgaattacctctgtcctcgattctggcagagatggaatttaccggtgtgaaagtagatgttgaacgcctgaaagaaatgggcgaggagctcacagaacaactgcgccaagtggagcaggaaatctataagttagctggccaagaattcaacattaacagccctaaacaactgggtgtcattctgtttgaaaaattacagcttcccgtcctgaagaagacgaagaccggctatagtacgagtgctgatgtgctcgagaaacttgccccgcagcatgaaatcgtcgagaaaattcttcactaccgtcagctcggtaaactgcaatccacatatattgaagggctgctgaaagttgtacatcgcgacacccataaagtccacaccatcttcaaccaggccctgactcaaaccgggcgcctgtcaagcaccgaacctaatctccagaacatcccaattcgtctggaagaaggccgcaaaattcgccaagcatttgtgccatcggaacctgactgggttatctttagcgcagattactcacagattgagctccgtgttctcgcacacctggcaaacgatgaaaatctgatcgatgcttttcgtcatgaccttgacatccatacgaagacagccatggatattttccatgtaacagcagatgaagttacccccaatatgcgtcgccaagcaaaagccgtgaacttcggtattgtctatgggatctctgattacggtctgagtcagcgtcttaatatcccacgcaaagaagccgccgaatttattcgtcgttatttcgaaagctttcccggcgttaaacagtacatggagaatattgtacaggaagccaaacagaaaggatacgtcaccacccttttacaccgccgccgctatctgccagacatcacctctcgtaatcgtaacttacgttcattcgcagaacgcacggccatgaacaccccaattcaaggatcagccgccgacatcatcaagaaggcaatgattgatttagctgatcgtctgaaacgcgagaaacttcaagctcgtatgctgctccaggttcatgacgaactgattcttgaagctcctcgtgaggaagtcgaacgcctgcagcagattgtacccgaggtcatggagaacgccatccagttaaccgtcccactgaaagttagctatcactacggtcctacgtggtacgacgctaag

SEQ ID NO: 100 - protein, 604 aa, synthetic construct
  REGION 1..604: note = Variant of DNA polymerase
MHHHHHHGGSGMVAPQTKKEEAVLPNINYTIVEEVTEPILADRSALVVEVLGSNYHKAPILGFALANEHGNFFIRTDTALSSPLFTAWLEDESKKKSVFDGKRAIVALKWKGIELRGIEFDLLIASYLLNPSQSTEDVASVAKTKQYMAVQSDEAVYGKGAKQTVPDENVLAEHLVRKAAAIRALEKELIHDLQENEQYALFTDLELPLSSILAEMEFTGVKVDVERLKEMGEELTEQLRQVEQEIYKLAGQEFNINSPKQLGVILFEKLQLPVLKKTKTGYSTSADVLEKLAPQHEIVEKILHYRQLGKLQSTYIEGLLKVVHRDTHKVHTIFNQALTQTGRLSSTEPNLQNIPIRLEEGRKIRQAFVPSEPDWVIFSADYSQIELRVLAHLANDENLIDAFRHDLDIHTKTAMDIFHVTADEVTPNMRRQAKAVNFGIVYGISDYGLSQRLNIPRKEAAEFIRRYFESFPGVKQYMENIVQEAKQKGYVTTLLHRRRYLPDITSRNRNLRSFAERTAMNTPIQGSAADIIKKAMIDLADRLKREKLQARMLLQVHDELILEAPREEVERLQQIVPEVMENAIQLTVPLKVSYHYGPTWYDAK

SEQ ID NO: 101 - DNA, 1812 bp, synthetic construct
  misc_feature 1..1812: note = Variant of DNA polymerase
  source 1..1812: mol_type = other DNA
atgcatcaccatcaccatcacggtggcagcggtatggttgcaccacagaccaaaaaagaagaagccgtactgccgaacatcaattatacaattgtggaggaagtcaccgaaccgattctcgcggatcgttcggcgttagtggttgaggttctggagtccaactaccataaggctccgatcctgggctttgccctggccaatgaacacggtaacttcttcattcgcactgacacggctctttcttctccgctgtttaccgcgtggctggaggatgagagcaagaagaaatcagtattcgacggtaaacgcgcaatcgtggccctgaaatggaaaggcattgaattacgtggcatcgaatttgacttgttgatcgcttcatatctcctgaatccctcgcaaagcacggaagatgtcgcaagcgtggccaagaccaaacagtacatggcagtacagagtgatgaggcagtctatggaaaaggtgcgaaacaaacggtgccagatgaaaacgttttagccgaacatctggtgcgtaaagctgctgcaattcgcgccctggagaaagaactgatccacgatttgcaggaaaatgaacaatacgccctgtttactgaccttgaattacctctgtcctcggtcctggcagagatggaatttaccggtgtgaaagtagatgttgaacgcctgaaagaaatgggcgaggagctcacagaacaactgcgccaagtggagcaggaaatctataagttagctggccaagaattcaacattaacagccctaaacaactgggtgtcattctgtttgaaaaattacagcttcccgtcctgaagaagacgaagaccggctatagtacgagtgctgatgtgctcgagaaacttgccccgcagcatgaaatcgtccgcaaaattcttcactaccgtcagctcggtaaactgcaatccacatatattgaagggctgctgaaagttgtacatcgcgacacccataaagtccacaccatcttcaaccaggccctgactcaaaccgggcgcctgtcaagcaccgaacctaatctccagaacatcccaattcgtctggaagaaggccgcaaaattcgccaagcatttgtgccatcggaacctgactgggttatctttagcgcagattactcacagattgagctccgtgttctcgcacacattgcaaacgatgaaaatctgatcgatgcttttcgtcatgaccttgacatccatacgaagacagccatggatattttccatgtaacagcagatgaagttacccccaatatgcgtcgccaagcaaaagccgtgaacttcggtattgtctatgggatctctgattacggtctgagtcagcgtcttaatatcccacgcaaagaagccgccgaatttattcgtcgttatttcgaaagctttcccggcgttaaacagtacatggagaatattgtacaggaagccaaacagaaaggatacgtcaccacccttttacaccgccgccgctatctgccagacatcacctctcgtaatcgtaacttacgttcattcgcagaacgcacggccatgaacaccccaattcaaggatcagccgccgacatcatcaagaaggcaatgattgatttagctgatcgtctgaaacgcgagaaacttcaagctcgtatgctgctccaggttcatgacgaactgattcttgaagctcctcgtgaggaagtcgaacgcctgcagcagattgtacccgaggtcatggagaacgccatccagttaaccgtcccactgaaagttagctatcactacggtcctacgtggtacgacgctaag

SEQ ID NO: 102 - protein, 604 aa, synthetic construct
  REGION 1..604: note = Variant of DNA polymerase
MHHHHHHGGSGMVAPQTKKEEAVLPNINYTIVEEVTEPILADRSALVVEVLESNYHKAPILGFALANEHGNFFIRTDTALSSPLFTAWLEDESKKKSVFDGKRAIVALKWKGIELRGIEFDLLIASYLLNPSQSTEDVASVAKTKQYMAVQSDEAVYGKGAKQTVPDENVLAEHLVRKAAAIRALEKELIHDLQENEQYALFTDLELPLSSVLAEMEFTGVKVDVERLKEMGEELTEQLRQVEQEIYKLAGQEFNINSPKQLGVILFEKLQLPVLKKTKTGYSTSADVLEKLAPQHEIVRKILHYRQLGKLQSTYIEGLLKVVHRDTHKVHTIFNQALTQTGRLSSTEPNLQNIPIRLEEGRKIRQAFVPSEPDWVIFSADYSQIELRVLAHIANDENLIDAFRHDLDIHTKTAMDIFHVTADEVTPNMRRQAKAVNFGIVYGISDYGLSQRLNIPRKEAAEFIRRYFESFPGVKQYMENIVQEAKQKGYVTTLLHRRRYLPDITSRNRNLRSFAERTAMNTPIQGSAADIIKKAMIDLADRLKREKLQARMLLQVHDELILEAPREEVERLQQIVPEVMENAIQLTVPLKVSYHYGPTWYDAK

SEQ ID NO: 103 - DNA, 1812 bp, synthetic construct
  misc_feature 1..1812: note = Variant of DNA polymerase
  source 1..1812: mol_type = other DNA
atgcatcaccatcaccatcacggtggcagcggtatggttgcaccacagaccaaaaaagaagaagccgtactgccgaacatcaattatacaattgtggaggaagtcaccgaaccgattctcgcggatcgttcggcgttagtggttgaggttctggggtccaactaccataaggctccgatcctgggctttgccctggccaatgaacacggtaacttcttcattcgcactgacacggctctttcttctccgctgtttaccgcgtggctggaggatgagagcaagaagaaatcagtattcgacggtaaacgcgcaatcgtggccctgaaatggaaaggcattgaattacgtggcatcgaatttgacttgttgatcgcttcatatctcctgaatccctcgcaaagcacggaagatgtcgcaagcgtggccaagaccaaacagtacatggcagtacagagtgatgaagcagtctatggaaaaggtgcgaaacaaacggtgccagatgaaaacgttttagccgaacatctggtgcgtaaagctgctgcaattcgcgccctggagaaagaactgatccacgatttgcaggaaaatgaacaatacgccctgtttactgaccttgaattacctctgtcctcgattctggcagagatggaatttaccggtgtgaaagtagatgttgaacgcctgaaagaaatgggcgaggagctcacagaacaactgcgccaagtggagcaggaaatctataagttagctggccaagaattcaacattaacagccctaaacaactgggtgtcattctgtttgaaaaattacagcttcccgtcctgaagaagacgaagaccggctatagtacgagtgctgatgtgctcgagaaacttgccccgcagcatgaaatcgtcgagaaaattcttcactaccgtcagctcggtaaactgcaatccacatatattgaagggctgctgaaagttgtacatcgcgacacccataaagtccacaccatcttcaaccaggccctgactcaaaccgggcgcctgtcaagcaccgaacctaatctccagaacatcccaattcgtctggaagaaggccgcaaaattcgccaagcatttgtgccatcggaacctgactgggttatctttagcgcagattactcacagattgagctccgtgttctcgcacacattgcaaacgatgaaaatctgatcgatgcttttcgtcatgaccttgacatccatacgaagacagccatggatattttccatgtaacagcagatgaagttacccccaatatgcgtcgccaagcaaaagccgtgaacttcggtattgtctatgggatctctgattacggtctgagtcagcgtcttaatatcccacgcaaagaagccgccgaatttattcgtcgttatttcgaaagctttcccggcgttaaacagtacatggagaatattgtacaggaagccaaacagaaaggatacgtcaccacccttttacaccgccgccgctatctgccagacatcacctctcgtaatcgtaacttacgttcattcgcagaacgcacggccatgaacaccccaattcaaggatcagccgccgacatcatcaagaaggcaatgattgatttagctgatcgtctgaaacgcgagaaacttcaagctcgtatgctgctccaggttcatgacgaactgattcttgaagctcctcgtgaggaagtcgaacgcctgcagcagattgtacccgaggtcatggagaacgccatccagttaaccgtcccactgaaagttagctatcactacggtcctacgtggtacgacgctaag

SEQ ID NO: 104 - protein, 604 aa, synthetic construct
  REGION 1..604: note = Variant of DNA polymerase
MHHHHHHGGSGMVAPQTKKEEAVLPNINYTIVEEVTEPILADRSALVVEVLGSNYHKAPILGFALANEHGNFFIRTDTALSSPLFTAWLEDESKKKSVFDGKRAIVALKWKGIELRGIEFDLLIASYLLNPSQSTEDVASVAKTKQYMAVQSDEAVYGKGAKQTVPDENVLAEHLVRKAAAIRALEKELIHDLQENEQYALFTDLELPLSSILAEMEFTGVKVDVERLKEMGEELTEQLRQVEQEIYKLAGQEFNINSPKQLGVILFEKLQLPVLKKTKTGYSTSADVLEKLAPQHEIVEKILHYRQLGKLQSTYIEGLLKVVHRDTHKVHTIFNQALTQTGRLSSTEPNLQNIPIRLEEGRKIRQAFVPSEPDWVIFSADYSQIELRVLAHIANDENLIDAFRHDLDIHTKTAMDIFHVTADEVTPNMRRQAKAVNFGIVYGISDYGLSQRLNIPRKEAAEFIRRYFESFPGVKQYMENIVQEAKQKGYVTTLLHRRRYLPDITSRNRNLRSFAERTAMNTPIQGSAADIIKKAMIDLADRLKREKLQARMLLQVHDELILEAPREEVERLQQIVPEVMENAIQLTVPLKVSYHYGPTWYDAK

SEQ ID NO: 105 - DNA, 1812 bp, synthetic construct
  misc_feature 1..1812: note = Variant of DNA polymerase
  source 1..1812: mol_type = other DNA
atgcatcaccatcaccatcacggtggcagcggtatggttgcaccacagaccaaaaaagaagaagccgtactgccgaacatcaattatacaattgtggaggaagtcaccgaaccgattctcgcggatcgttcggcgttagtggttgaggttctggagtccaactaccataaggctccgatcctgggctttgccctggccaatgaacacggtaacttcttcattcgcactgacacggctctttcttctccgctgtttaccgcgtggctggaggatgagagcaagaagaaatcagtattcgacggtaaacgcgcaatcgtggccctgaaatggaaaggcattgaattacgtggcatcgaatttgacttgttgattgcttcatatctcctgaatccctcgcaaagcacggaagatgtcgcaagcgtggccaagaccaaacagtacatggcagtacagagtgattgggcagtctatggaaaaggtgcgaaacaaacggtgccagatgaaaacgttttagccgaacatctggtgcgtaaagctgctgcaattcgcgccctggagaaagaactgatccacgatttgcaggaaaatgaacaatacgccctgtttactgaccttgaattacctctgtcctcggtcctggcagagatggaatttaccggtgtgaaagtagatgttgaacgcctgaaagaaatgggcgaggagctcacagaacaactgcgccaagtggagcaggaaatctataagttagctggccaagaattcaacattaacagccctaaacaactgggtgtcattctgtttgaaaaattacagcttcccgtcctgaagaagacgaagaccggctatagtacgagtgctgatgtgctcgagaaacttgcccctcagcatgaaatcgtccgcaaaattcttcactaccgtcagctcggtaaactgcaatccacatatattgaagggctgctgaaagttgtacatcgcgacacccataaagtccacaccatcttcaaccaggccctgactcaaaccgggcgcctgtcaagcaccgaacctaatctccagaacatcccaattcgtctggaagaaggccgcaaaattcgccaagcatttgtgccatcgaaacctgactgggttatctttagcgcagattactcacagattgagctccgtgttctcgcacacattgcaaacgatgaaaatctgatcgatgcttttcgtcatgaccttgacatccatacgaagacagccatggatattttccatgtaacagcagatgaagttacccccaatatgcgtcgccaagcaaaagccgtgaacttcggtattgtctatgggatctctgattacggtctgagtcagcgtcttaatatcccacgcaaagaagccgccgaatttattcgtcgttatttcgaaagctttcccggcgttaaacagtacatggagaatattgtacaggaagccaaacagaaaggatacgtcaccacccttttacaccgccgccgctatctgccagacatcacctctcgtaatcgtaacttacgttcattcgcagaacgcacggccatgaacaccccaattcaaggatcagccgccgacatcatcaagaaggcaatgattgatttagctgatcgtctgaaacgcgagaaacttcaagctcgtatgctgctccaggttcatgacgaactgattcttgaagctcctcgtgaggaagtcgaacgcctgcagcagattgtacccgaggtcatggagaacgccatccagttaaccgtcccactgaaagttagctatcactacggtcctacgtggtacgacgctaag

SEQ ID NO: 106 - protein, 604 aa, synthetic construct
  REGION 1..604: note = Variant of DNA polymerase
MHHHHHHGGSGMVAPQTKKEEAVLPNINYTIVEEVTEPILADRSALVVEVLESNYHKAPILGFALANEHGNFFIRTDTALSSPLFTAWLEDESKKKSVFDGKRAIVALKWKGIELRGIEFDLLIASYLLNPSQSTEDVASVAKTKQYMAVQSDWAVYGKGAKQTVPDENVLAEHLVRKAAAIRALEKELIHDLQENEQYALFTDLELPLSSVLAEMEFTGVKVDVERLKEMGEELTEQLRQVEQEIYKLAGQEFNINSPKQLGVILFEKLQLPVLKKTKTGYSTSADVLEKLAPQHEIVRKILHYRQLGKLQSTYIEGLLKVVHRDTHKVHTIFNQALTQTGRLSSTEPNLQNIPIRLEEGRKIRQAFVPSKPDWVIFSADYSQIELRVLAHIANDENLIDAFRHDLDIHTKTAMDIFHVTADEVTPNMRRQAKAVNFGIVYGISDYGLSQRLNIPRKEAAEFIRRYFESFPGVKQYMENIVQEAKQKGYVTTLLHRRRYLPDITSRNRNLRSFAERTAMNTPIQGSAADIIKKAMIDLADRLKREKLQARMLLQVHDELILEAPREEVERLQQIVPEVMENAIQLTVPLKVSYHYGPTWYDAK

SEQ ID NO: 107 - DNA, 1812 bp, synthetic construct
  misc_feature 1..1812: note = Variant of DNA polymerase
  source 1..1812: mol_type = other DNA
atgcatcaccatcaccatcacggtggcagcggtatggttgcaccacagaccaaaaaagaagaagccgtactgccgaacatcaattatacaattgtggaggaagtcaccgaaccgattctcgcggatcgttcggcgttagtggttgaggttctggggtccaactaccataaggctccgatcctgggctttgccctggccaatgaacacggtaacttcttcattcgcactgacacggctctttcttctccgctgtttaccgcgtggctggaggatgagagcaagaagaaatcagtattcgacggtaaacgcgcaatcgtggccctgaaatggaaaggcattgaattacgtggcatcgaatttgacttgttgctggcttcatatctcctgaatccctcgcaaagcacggaagatgtcgcaagcgtggccaagaccaaacagtacatggcagtacagagtgatgaggcagtctatggaaaaggtgcgaaacaaacggtgccagatgaaaacgttttagccgaacatctggtgcgtaaagctgctgcaattcgcgccctggagaaagaactgatccacgatttgcaggaaaatgaacaatacgccctgtttactgaccttgaattacctctgtcctcggtcctggcagagatggaatttaccggtgtgaaagtagatgttgaacgcctgaaagaaatgggcgaggagctcacagaacaactgcgccaagtggagcaggaaatctataagttagctggccaagaattcaacattaacagccctaaacaactgggtgtcattctgtttgaaaaattacagcttcccgtcctgaagaagacgaagaccggctatagtacgagtgctgatgtgctcgagaaacttgcccgtcagcatgaaatcgtcgagaaaattcttcactaccgtcagctcggtaaactgcaatccacatatattgaagggctgctgaaagttgtacatcgcgacacccataaagtccacaccatcttcaaccaggccctgactcaaaccgggcgcctgtcaagcaccgaacctaatctccagaacatcccaattcgtctggaagaaggccgcaaaattcgccaagcatttgtgccatcggaacctgactgggttatctttagcgcagattactcacagattgagctccgtgttctcgcacacctggcaaacgatgaaaatctgatcgatgcttttcgtcatgaccttgacatccatacgaagacagccatggatattttccatgtaacagcagatgaagttacccccaatatgcgtcgccaagcaaaagccgtgaacttcggtattgtctatgggatctctgattacggtctgagtcagcgtcttaatatcccacgcaaagaagccgccgaatttattcgtcgttatttcgaaagctttcccggcgttaaacagtacatggagaatattgtacaagaagccaaacagaaaggatacgtcaccacccttttacaccgccgccgctatctgccagacatcacctctcgtaatttcaacttacgttcattcgcagaacgcacggccatgaacaccccaattcaaggatcagccgccgacatcatcaagaaggcaatgattgatttagctgatcgtctgaaacgcgagaaacttcaagctcgtatgctgctccaggttcatgacgaactgattcttgaagctcctcgtgaggaagtcgaacgcctgcagcagattgtacccgaggtcatggagaacgccatccagttaaccgtcccactgaaagttagctatcactacggtcctacgtggtacgacgctaag

SEQ ID NO: 108 - protein, 604 aa, synthetic construct
  REGION 1..604: note = Variant of DNA polymerase
MHHHHHHGGSGMVAPQTKKEEAVLPNINYTIVEEVTEPILADRSALVVEVLGSNYHKAPILGFALANEHGNFFIRTDTALSSPLFTAWLEDESKKKSVFDGKRAIVALKWKGIELRGIEFDLLLASYLLNPSQSTEDVASVAKTKQYMAVQSDEAVYGKGAKQTVPDENVLAEHLVRKAAAIRALEKELIHDLQENEQYALFTDLELPLSSVLAEMEFTGVKVDVERLKEMGEELTEQLRQVEQEIYKLAGQEFNINSPKQLGVILFEKLQLPVLKKTKTGYSTSADVLEKLARQHEIVEKILHYRQLGKLQSTYIEGLLKVVHRDTHKVHTIFNQALTQTGRLSSTEPNLQNIPIRLEEGRKIRQAFVPSEPDWVIFSADYSQIELRVLAHLANDENLIDAFRHDLDIHTKTAMDIFHVTADEVTPNMRRQAKAVNFGIVYGISDYGLSQRLNIPRKEAAEFIRRYFESFPGVKQYMENIVQEAKQKGYVTTLLHRRRYLPDITSRNFNLRSFAERTAMNTPIQGSAADIIKKAMIDLADRLKREKLQARMLLQVHDELILEAPREEVERLQQIVPEVMENAIQLTVPLKVSYHYGPTWYDAK

SEQ ID NO: 109 - DNA, 1812 bp, synthetic construct
  misc_feature 1..1812: note = Variant of DNA polymerase
  source 1..1812: mol_type = other DNA
atgcatcaccatcaccatcacggtggcagcggtatggttgcaccacagaccaaaaaagaagaagccgtactgccgaacatcaattatacaattgtggaggaagtcaccgaaccgattctcgcggatcgttcggcgttagtggttgaggttctggagtccaactaccataaggctccgatcctgggctttgccctggccaatgaacacggtaacttcttcattcgcactgacacggctctttcttctccgctgtttaccgcgtggctggaggatgagagcaagaagaaatcagtattcgacggtaaacgcgcaatcgtggccctgaaatggaaaggcattgaattacgtggcatcgaatttgacttgttgctggcttcatatctcctgaatccctcgcaaagcacggaagatgtcgcaagcgtggccaagaccaaacagtacatggcagtacagagtgatgaagcagtctatggaaaaggtgcgaaacaaacggtgccagatgaaaacgttttagccgaacatctggtgcgtaaagctgctgcaattcgcgccctggagaaagaactgatccacgatttgcaggaaaatgaacaatacgccctgtttactgaccttgaattacctctgtcctcgattctggcagagatggaatttaccggtgtgaaagtagatgttgaacgcctgaaagaaatgggcgaggagctcacagaacaactgcgccaagtggagcaggaaatctataagttagctggccaagaattcaacattaacagccctaaacaactgggtgtcattctgtttgaaaaattacagcttcccgtcctgaagaagacgaagaccggctatagtacgagtgctgatgtgctcgagaaacttgcccctcagcatgaaatcgtcgagaaaattcttcactaccgtcagctcggtaaactgcaatccacatatattgaagggctgctgaaagttgtacatcgcgacacccataaagtccacaccatcttcaaccaggccctgactcaaaccgggcgcctgtcaagcaccgaacctaatctccagaacatcccaattcgtctggaagaaggccgcaaaattcgccaagcatttgtgccatcggaacctgactgggttatctttagcgcagattactcacagattgagctccgtgttctcgcacacattgcaaacgatgaaaatctgatcgatgcttttcgtcatgaccttgacatccatacgaagacagccatggatattttccatgtaacagcagatgaagttacccccaatatgcgtcgccaagcaaaagccgtgaacttcggtattgtctatgggatctctgattacggtctgagtcagcgtcttaatatcccacgcaaagaagccgccgaatttattcgtcgttatttcgaaagctttcccggcgttaaacagtacatggagaatattgtacaagaagccaaacagaaaggatacgtcaccacccttttacaccgccgccgctatctgccagacatcacctctcgtaatcgtaacttacgttcattcgcagaacgcacggccatgaacaccccaattcaaggatcagccgccgacatcatcaagaaggcaatgattgatttagctgatcgtctgaaacgcgagaaacttcaagctcgtatgctgctccaggttcatgacgaactgattcttgaagctcctcgtgaggaagtcgaacgcctgcagcagattgtacccgaggtcatggagaacgccatccagttaaccgtcccactgaaagttgattatcactacggtcctacgtggtacgacgctaag

SEQ ID NO: 110 - protein, 604 aa, synthetic construct
  REGION 1..604: note = Variant of DNA polymerase
MHHHHHHGGSGMVAPQTKKEEAVLPNINYTIVEEVTEPILADRSALVVEVLESNYHKAPILGFALANEHGNFFIRTDTALSSPLFTAWLEDESKKKSVFDGKRAIVALKWKGIELRGIEFDLLLASYLLNPSQSTEDVASVAKTKQYMAVQSDEAVYGKGAKQTVPDENVLAEHLVRKAAAIRALEKELIHDLQENEQYALFTDLELPLSSILAEMEFTGVKVDVERLKEMGEELTEQLRQVEQEIYKLAGQEFNINSPKQLGVILFEKLQLPVLKKTKTGYSTSADVLEKLAPQHEIVEKILHYRQLGKLQSTYIEGLLKVVHRDTHKVHTIFNQALTQTGRLSSTEPNLQNIPIRLEEGRKIRQAFVPSEPDWVIFSADYSQIELRVLAHIANDENLIDAFRHDLDIHTKTAMDIFHVTADEVTPNMRRQAKAVNFGIVYGISDYGLSQRLNIPRKEAAEFIRRYFESFPGVKQYMENIVQEAKQKGYVTTLLHRRRYLPDITSRNRNLRSFAERTAMNTPIQGSAADIIKKAMIDLADRLKREKLQARMLLQVHDELILEAPREEVERLQQIVPEVMENAIQLTVPLKVDYHYGPTWYDAK

SEQ ID NO: 111 - DNA, 1812 bp, synthetic construct
  misc_feature 1..1812: note = Variant of DNA polymerase
  source 1..1812: mol_type = other DNA
atgcatcaccatcaccatcacggtggcagcggtatggttgcaccacagaccaaaaaagaagaggccgtactgccgaacatcaattatacaattgtggaggaagtcaccgaaccgattctcgcggatcgttcggcgttagtggttgaggttctggaatccaactaccataaggctccgatcctgggctttgccctggccaatgaacacggtaacttcttcattcgcactgacacggctctttcttctccgctgtttaccgcgtggctggaggatgagagcaagaagaaatcagtattcgacggtaaacgcgcaatcgtggccctgaaatggaaaggcattgaattacgtggcatcgaatttgacttgttgatcgcttcatatctcctgaatccctcgcaaagcacggaagatgtcgcaagcgtggccaagaccaaacagtacatggcagtacagcgcgatgaagcagtctatggaaaaggtgcgaaacaaacggtgccagatgaaaacgttttagccgaacatctggtgcgtaaagctgctgcaattcgcgccctggagaaagaactgatccacgatttgcaggaaaatgaacaatacgccctgtttactgaccttgaattacctctgtcctcgattctggcagagatggaatttaccggtgtgaaagtagatgttgaacgcctgaaagaaatgggcgaggagctcacagaacaactgcgccaagtggagcaggaaatctataagttagctggccaacgcttcaacattaacagccctaaacaactgggtgtcattctgtttgaaaaattacagcttcccgtcctgaagaagacgaagaccggctatagtacgagtgctcgcgtgctcgagaaacttgccccgcaacatgaaatcgtcgagaaaattcttcattaccgtcagctcggtaaactgcaatccacatatattgaagggctgctgaaagttgtacatcgcgacacccataaagtccacaccatcttcaaccaggccctgactcaaaccgggcgcctgtcaagcaccgaacctaatctccagaacatcccaattcgtctggaagaaggccgcaaaattcgccaagcatttgtgccatcggaacctgactgggttatctttagcgcagattactcacagattgagctccgtgttctcgcacacattgcaaacgatgaaaatctgatcgatgcttttcgtcatgaccttgacatccatacgaagacagccatggatattttccatgtaacagcagatgaagttacccccaatatgcgtcgccaagcaaaagccgtgaacttcggtattgtctatgggatctctgattacggtctgagtcagaaccttaacatcccacgcaaagaagccgccgaatttattcgtcgttatttcgaaagctttcccggcgttaaacagtacatggagaatattgtacaggaagccaaacagaaaggatacgtcaccacccttttacaccgccgccgctatctgccagacatccactctcgtaatttcaacttacgttcattcgcagaacgcacggccatgaacaccccaattcaaggatcagccgccgacatcatcaagaaggcaatgattgatttagctcgtcgtctgaaacgcgagaaacttcaagctcgtatgctgctccaggttcatgacgaactgattcttgaagctcctcgtgaggaagtcgaacgcctggttcagattgtacccgaggtcatggagaacgccgtccagttaaccgtcccactgaaagttgattatcactacggtcctacgtggtacgacgctaag

SEQ ID NO: 112 - protein, 604 aa, synthetic construct
  REGION 1..604: note = Variant of DNA polymerase
MHHHHHHGGSGMVAPQTKKEEAVLPNINYTIVEEVTEPILADRSALVVEVLESNYHKAPILGFALANEHGNFFIRTDTALSSPLFTAWLEDESKKKSVFDGKRAIVALKWKGIELRGIEFDLLIASYLLNPSQSTEDVASVAKTKQYMAVQRDEAVYGKGAKQTVPDENVLAEHLVRKAAAIRALEKELIHDLQENEQYALFTDLELPLSSILAEMEFTGVKVDVERLKEMGEELTEQLRQVEQEIYKLAGQRFNINSPKQLGVILFEKLQLPVLKKTKTGYSTSARVLEKLAPQHEIVEKILHYRQLGKLQSTYIEGLLKVVHRDTHKVHTIFNQALTQTGRLSSTEPNLQNIPIRLEEGRKIRQAFVPSEPDWVIFSADYSQIELRVLAHIANDENLIDAFRHDLDIHTKTAMDIFHVTADEVTPNMRRQAKAVNFGIVYGISDYGLSQNLNIPRKEAAEFIRRYFESFPGVKQYMENIVQEAKQKGYVTTLLHRRRYLPDIHSRNFNLRSFAERTAMNTPIQGSAADIIKKAMIDLARRLKREKLQARMLLQVHDELILEAPREEVERLVQIVPEVMENAVQLTVPLKVDYHYGPTWYDAK

SEQ ID NO: 113 - DNA, 1812 bp, synthetic construct
  misc_feature 1..1812: note = Variant of DNA polymerase
  source 1..1812: mol_type = other DNA
atgcatcaccatcaccatcacggtggcagcggtatggttgcaccacagaccaaaaaagaagaagccgtactgccgaacatcaattatacaattgtggaggaagtcaccgaaccgattctcgcggatcgttcggcgttagtggttgaggttctggagtccaactaccataaggctccgatcctgggctttgccctggccaatgaacacggtaacttcttcattcgcactgacacggctctttcttctccgctgtttaccgcgtggctggaggatgagagcaagaagaaatcagtattcgacggtaaacgcgcaatcgtggccctgaaatggaaaggcattgaattacgtggcatcgaatttgacttgttgatcgcttcatatctcctgaatccctcgcaaagcacggaagatgtcgcaagcgtggccaagaccaaacagtacatggcagtacagagtgattgggcagtctatggaaaaggtgcgaaacaaacggtgccagatgaaaacgttttagccgaacatctggtgcgtaaagctgctgcaattcgcgccctggagaaagaactgatccacgatttgcaggaaaatgaacaatacgccctgtttactgaccttgaattacctctgtcctcggtcctggcagagatggaatttaccggtgtgaaagtagatgttgaacgcctgaaagaaatgggcgaggagctcacagaacaactgcgccaagtggagcaggaaatctataagttagctggccaagaattcaacattaacagccctaaacaactgggtgtcattctgtttgaaaaattacagcttcccgtcctgaagaagacgaagaccggctatagtacgagtgctgatgtgctcgagaaacttgccccgcagcatgaaatcgtccgcaaaattcttcactaccgtcagctcggtaaactgcaatccacatatattgaagggctgctgaaagttgtacatcgcgacacccataaagtccacaccatcttcaaccaggccctgactcaaaccgggcgcctgtcaagcaccgaacctaatctccagaacatcccaattcgtctggaagaaggccgcaaaattcgccaagcatttgtgccatcggaacctgactgggttatctttagcgcagattactcacagattgagctccgtgttctcgcacacattgcaaacgatgaaaatctgatcgatgcttttcgtcatgaccttgacatccatacgaagacagccatggatattttccatgtaacagcagatgaagttacccccaatatgcgtcgccaagcaaaagccgtgaacttcggtattgtctatgggatctctgattacggtctgagtcagcgtcttaatatcccacgcaaagaagccgccgaatttattcgtcgttatttcgaaagctttcccggcgttaaacagtacatggagaatattgtacaggaagccaaacagaaaggatacgtcaccacccttttacaccgccgccgctatctgccagacatcacctctcgtaatttcaacttacgttcattcgcagaacgcacggccatgaacaccccaattcaaggatcagccgccgacatcatcaagaaggcaatgattgatttagctgatcgtctgaaacgcgagaaacttcaagctcgtatgctgctccaggttcatgacgaactgattcttgaagctcctcgtgaggaagtcgaacgcctgcagcagattgtacccgaggtcatggagaacgccatccagttaaccgtcccactgaaagttgattatcactacggtcctacgtggtacgacgctaag

SEQ ID NO: 114 - protein, 604 aa, synthetic construct
  REGION 1..604: note = Variant of DNA polymerase
MHHHHHHGGSGMVAPQTKKEEAVLPNINYTIVEEVTEPILADRSALVVEVLESNYHKAPILGFALANEHGNFFIRTDTALSSPLFTAWLEDESKKKSVFDGKRAIVALKWKGIELRGIEFDLLIASYLLNPSQSTEDVASVAKTKQYMAVQSDWAVYGKGAKQTVPDENVLAEHLVRKAAAIRALEKELIHDLQENEQYALFTDLELPLSSVLAEMEFTGVKVDVERLKEMGEELTEQLRQVEQEIYKLAGQEFNINSPKQLGVILFEKLQLPVLKKTKTGYSTSADVLEKLAPQHEIVRKILHYRQLGKLQSTYIEGLLKVVHRDTHKVHTIFNQALTQTGRLSSTEPNLQNIPIRLEEGRKIRQAFVPSEPDWVIFSADYSQIELRVLAHIANDENLIDAFRHDLDIHTKTAMDIFHVTADEVTPNMRRQAKAVNFGIVYGISDYGLSQRLNIPRKEAAEFIRRYFESFPGVKQYMENIVQEAKQKGYVTTLLHRRRYLPDITSRNFNLRSFAERTAMNTPIQGSAADIIKKAMIDLADRLKREKLQARMLLQVHDELILEAPREEVERLQQIVPEVMENAIQLTVPLKVDYHYGPTWYDAK

SEQ ID NO: 115 - DNA, 1812 bp, synthetic construct
  misc_feature 1..1812: note = Variant of DNA polymerase
  source 1..1812: mol_type = other DNA
atgcatcaccatcaccatcacggtggcagcggtatggttgcaccacagaccaaaaaagaagaggccgtactgccgaacatcaattatacaattgtggaggaagtcaccgaaccgattctcgcggatcgttcggcgttagtggttgaggttctggaatccaactaccataaggctccgatcctgggctttgccctggccaatgaacacggtaacttcttcattcgcactgacacggctctttcttctccgctgtttaccgcgtggctggaggatgagagcaagaagaaatcagtattcgacggtaaacgcgcaatcgtggccctgaaatggaaaggcattgaattacgtggcatcgaatttgacttgttgatcgcttcatatctcctgaatccctcgcaaagcacggaagatgtcgcaagcgtggccaagaccaaacagtacatggcagtacagcgcgatgaagcagtctatggaaaaggtgcgaaacaaacggtgccagatgaaaacgttttagccgaacatctggtgcgtaaagctgctgcaattcgcgccctggagaaagaactgatccacgatttgcaggaaaatgaacaatacgccctgtttactgaccttgaattacctctgtcctcgattctggcagagatggaatttaccggtgtgaaagtagatgttgaacgcctgaaagaaatgggcgaggagctcacagaacaactgcgccaagtggagcaggaaatctataagttagctggccaacgcttcaacattaacagccctaaacaactgggtgtcattctgtttgaaaaattacagcttcccgtcctgaagaagacgaagaccggctatagtacgagtgctcgcgtgctcgagaaacttgccccgcagcatgaaatcgtcgagaaaattcttctgtaccgtcagctcggtaaactgcaatccacatatattgaagggctgctgaaagttgtacatcgcgacacccataaagtccacaccatcttcaaccaggccctgactcaaaccgggcgcctgtcaagcaccgaacctaatctccagaacatcccaattcgtctggaagaaggccgcaaaattcgccaagcatttgtgccatcggaacctgactgggttatctttagcgcagattactcacagattgagctccgtgttctcgcacacattgcaaacgatgaaaatctgatcgatgcttttcgtcatgaccttgacatccatacgaagacagccatggatattttccatgtaacagcagatgaagttacccccaatatgcgtcgccaagcaaaagccgtgaacttcggtattgtctatgggatctctgattacggtctgagtcagaaccttgggatcccacgcaaagaagccgccgaatttattcgtcgttatttcgaaagctttcccggcgttaaacagtacatggagaatattgtacaggaagccaaacagaaaggatacgtcaccacccttttacaccgccgccgctatctgccagacatcacctctcgtaatttcaacttacgttcattcgcagaacgcacggccatgaacaccccaattcaaggatcagccgccgacatcatcaagaaggcaatgattgatttagctgatcgtctgaaaaaagagaaacttcaagctcgtatgctgctccaggttcatgacgaactgattcttgaagctcctcgtgaggaagtcgaacgcctggttcagattgtacccgaggtcatggagaacgccgtccagttaaccgtcccactgaaagttgattatcactacggtcctacgtggtacgacgctaag

SEQ ID NO: 116 - protein, 604 aa, synthetic construct
  REGION 1..604: note = Variant of DNA polymerase
MHHHHHHGGSGMVAPQTKKEEAVLPNINYTIVEEVTEPILADRSALVVEVLESNYHKAPILGFALANEHGNFFIRTDTALSSPLFTAWLEDESKKKSVFDGKRAIVALKWKGIELRGIEFDLLIASYLLNPSQSTEDVASVAKTKQYMAVQRDEAVYGKGAKQTVPDENVLAEHLVRKAAAIRALEKELIHDLQENEQYALFTDLELPLSSILAEMEFTGVKVDVERLKEMGEELTEQLRQVEQEIYKLAGQRFNINSPKQLGVILFEKLQLPVLKKTKTGYSTSARVLEKLAPQHEIVEKILLYRQLGKLQSTYIEGLLKVVHRDTHKVHTIFNQALTQTGRLSSTEPNLQNIPIRLEEGRKIRQAFVPSEPDWVIFSADYSQIELRVLAHIANDENLIDAFRHDLDIHTKTAMDIFHVTADEVTPNMRRQAKAVNFGIVYGISDYGLSQNLGIPRKEAAEFIRRYFESFPGVKQYMENIVQEAKQKGYVTTLLHRRRYLPDITSRNFNLRSFAERTAMNTPIQGSAADIIKKAMIDLADRLKKEKLQARMLLQVHDELILEAPREEVERLVQIVPEVMENAVQLTVPLKVDYHYGPTWYDAK

SEQ ID NO: 117 - DNA, 1812 bp, synthetic construct
  misc_feature 1..1812: note = Variant of DNA polymerase
  source 1..1812: mol_type = other DNA
atgcatcaccatcaccatcacggtggcagcggtatggttgcaccacagaccaaaaaagaagaagccgtactgccgaacatcaattatacaattgtggaggaagtcaccgaaccgattctcgcggatcgttcggcgttagtggttgaggttctggggtccaactaccataaggctccgatcctgggctttgccctggccaatgaacacggtaacttcttcattcgcactgacacggctctttcttctccgctgtttaccgcgtggctggaggatgagagcaagaagaaatcagtattcgacggtaaacgcgcaatcgtggccctgaaatggaaaggcattgaattacgtggcatcgaatttgacttgttgctggcttcatatctcctgaatccctcgcaaagcacggaagatgtcgcaagcgtggccaagaccaaacagtacatggcagtacagagtgattgggcagtctatggaaaaggtgcgaaacaaacggtgccagatgaaaacgttttagccgaacatctggtgcgtaaagctgctgcaattcgcgccctggagaaagaactgatccacgatttgcaggaaaatgaacaatacgccctgtttactgaccttgaattacctctgtcctcgatcctggcagagatggaatttaccggtgtgaaagtagatgttgaacgcctgaaagaaatgggcgaggagctcacagaacaactgcgccaagtggagcaggaaatctataagttagctggccaagaattcaacattaacagccctaaacaactgggtgtcattctgtttgaaaaattacagcttcccgtcctgaagaagacgaagaccggctatagtacgagtgctgatgtgctcgagaaacttgcccgtcagcatgaaatcgtcgcgaaaattcttcactaccgtcagctcggtaaactgcaatccacatatattgaagggctgctgaaagttgtacatcgcgacacccataaagtccacaccatcttcaaccaggccctgactcaaaccgggcgcctgtcaagcaccgaacctaatctccagaacatcccaattcgtctggaagaaggccgcaaaattcgccaagcatttgtgccatcgaaacctgactgggttatctttagcgcagattactcacagattgagctccgtgttctcgcacacattgcaaacgatgaaaatctgatcgatgcttttcgtcatgaccttgacatccatacgaagacagccatggatattttccatgtaacagcagatgaagttacccccaatatgcgtcgccaagcaaaagccgtgaacttcggtattgtctatgggatctctgattacggtctgagtcagcgtcttaatatcccacgcaaagaagccgccgaatttattcgtcgttatttcgaaagctttcccggcgttaaacagtacatggagaatattgtacaagaagccaaacagaaaggatacgtcaccacccttttacaccgccgccgctatctgccagacatcacctctcgtaatcgtaacttacgttcattcgcagaacgcacggccatgaacaccccaattcaaggatcagccgccgacatcatcaagaaggcaatgattgatttagctgatcgtctgaaacgcgagaaacttcaagctcgtatgctgctccaggttcatgacgaactgattcttgaagctcctcgtgaggaagtcgaacgcctgcagcagattgtacccgaggtcatggagaacgccatccagttaaccgtcccactgaaagttgattatcactacggtcctacgtggtacgacgctaag

SEQ ID NO: 118 - protein, 604 aa, synthetic construct
  REGION 1..604: note = Variant of DNA polymerase
MHHHHHHGGSGMVAPQTKKEEAVLPNINYTIVEEVTEPILADRSALVVEVLGSNYHKAPILGFALANEHGNFFIRTDTALSSPLFTAWLEDESKKKSVFDGKRAIVALKWKGIELRGIEFDLLLASYLLNPSQSTEDVASVAKTKQYMAVQSDWAVYGKGAKQTVPDENVLAEHLVRKAAAIRALEKELIHDLQENEQYALFTDLELPLSSILAEMEFTGVKVDVERLKEMGEELTEQLRQVEQEIYKLAGQEFNINSPKQLGVILFEKLQLPVLKKTKTGYSTSADVLEKLARQHEIVAKILHYRQLGKLQSTYIEGLLKVVHRDTHKVHTIFNQALTQTGRLSSTEPNLQNIPIRLEEGRKIRQAFVPSKPDWVIFSADYSQIELRVLAHIANDENLIDAFRHDLDIHTKTAMDIFHVTADEVTPNMRRQAKAVNFGIVYGISDYGLSQRLNIPRKEAAEFIRRYFESFPGVKQYMENIVQEAKQKGYVTTLLHRRRYLPDITSRNRNLRSFAERTAMNTPIQGSAADIIKKAMIDLADRLKREKLQARMLLQVHDELILEAPREEVERLQQIVPEVMENAIQLTVPLKVDYHYGPTWYDAK

SEQ ID NO: 119 - DNA, 1812 bp, synthetic construct
  misc_feature 1..1812: note = Variant of DNA polymerase
  source 1..1812: mol_type = other DNA
atgcatcaccatcaccatcacggtggcagcggtatggttgcaccacagaccaaaaaagaagaagccgtactgccgaacatcaattatacaattgtggaggaagtcaccgaaccgattctcgcggatcgttcggcgttagtggttgaggttctggagtccaactaccataaggctccgatcctgggctttgccctggccaatgaacacggtaacttcttcattcgcactgacacggctctttcttctccgctgtttaccgcgtggctggaggatgagagcaagaagaaatcagtattcgacggtaaacgcgcaatcgtggccctgaaatggaaaggcattgaattacgtggcatcgaatttgacttgttgattgcttcatatctcctgaatccctcgcaaagcacggaagatgtcgcaagcgtggccaagaccaaacagtacatggcagtacagagtgatgaagcagtctatggaaaaggtgcgaaacaaacggtgccagatgaaaacgttttagccgaacatctggtgcgtaaagctgctgcaattcgcgccctggagaaagaactgatccacgatttgcaggaaaatgaacaatacgccctgtttactgaccttgaattacctctgtcctcgatcctggcagagatggaatttaccggtgtgaaagtagatgttgaacgcctgaaagaaatgggcgaggagctcacagaacaactgcgccaagtggagcaggaaatctataagttagctggccaagaattcaacattaacagccctaaacaactgggtgtcattctgtttgaaaaattacagcttcccgtcctgaagaagacgaagaccggctatagtacgagtgctgatgtgctcgagaaacttgcccgtcagcatgaaatcgtccgcaaaattcttcactaccgtcagctcggtaaactgcaatccacatatattgaagggctgctgaaagttgtacatcgcgacacccataaagtccacaccatcttcaaccaggccctgactcaaaccgggcgcctgtcaagcaccgaacctaatctccagaacatcccaattcgtctggaagaaggccgcaaaattcgccaagcatttgtgccatcgaaacctgactgggttatctttagcgcagattactcacagattgagctccgtgttctcgcacacattgcaaacgatgaaaatctgatcgatgcttttcgtcatgaccttgacatccatacgaagacagccatggatattttccatgtaacagcagatgaagttacccccaatatgcgtcgccaagcaaaagccgtgaacttcggtattgtctatgggatctctgattacggtctgagtcagagtcttaatatcccacgcaaagaagccgccgaatttattcgtcgttatttcgaaagctttcccggcgttaaacagtacatggagaatattgtacaagaagccaaacagaaaggatacgtcaccacccttttacaccgccgccgctatctgccagacatcacctctcgtaatcgtaacttacgttcattcgcagaacgcacggccatgaacaccccaattcaaggatcagccgccgacatcatcaagaaggcaatgattgatttagctgatcgtctgaaacgcgagaaacttcaagctcgtatgctgctccaggttcatgacgaactgattcttgaagctcctcgtgaggaagtcgaacgcctgcagcagattgtacccgaggtcatggagaacgccatccagttaaccgtcccactgaaagttagctatcactacggtcctacgtggtacgacgctaag

SEQ ID NO: 120 - protein, 604 aa, synthetic construct
  REGION 1..604: note = Variant of DNA polymerase
MHHHHHHGGSGMVAPQTKKEEAVLPNINYTIVEEVTEPILADRSALVVEVLESNYHKAPILGFALANEHGNFFIRTDTALSSPLFTAWLEDESKKKSVFDGKRAIVALKWKGIELRGIEFDLLIASYLLNPSQSTEDVASVAKTKQYMAVQSDEAVYGKGAKQTVPDENVLAEHLVRKAAAIRALEKELIHDLQENEQYALFTDLELPLSSILAEMEFTGVKVDVERLKEMGEELTEQLRQVEQEIYKLAGQEFNINSPKQLGVILFEKLQLPVLKKTKTGYSTSADVLEKLARQHEIVRKILHYRQLGKLQSTYIEGLLKVVHRDTHKVHTIFNQALTQTGRLSSTEPNLQNIPIRLEEGRKIRQAFVPSKPDWVIFSADYSQIELRVLAHIANDENLIDAFRHDLDIHTKTAMDIFHVTADEVTPNMRRQAKAVNFGIVYGISDYGLSQSLNIPRKEAAEFIRRYFESFPGVKQYMENIVQEAKQKGYVTTLLHRRRYLPDITSRNRNLRSFAERTAMNTPIQGSAADIIKKAMIDLADRLKREKLQARMLLQVHDELILEAPREEVERLQQIVPEVMENAIQLTVPLKVSYHYGPTWYDAK

SEQ ID NO: 121 - DNA, 1812 bp, synthetic construct
  misc_feature 1..1812: note = Variant of DNA polymerase
  source 1..1812: mol_type = other DNA
atgcatcaccatcaccatcacggtggcagcggtatggttgcaccacagaccaaaaaagaagaagccgtactgccgaacatcaattatacaattgtggaggaagtcaccgaaccgattctcgcggatcgttcggcgttagtggttgaggttctggggtccaactaccataaggctccgatcctgggctttgccctggccaatgaacacggtaacttcttcattcgcactgacacggctctttcttctccgctgtttaccgcgtggctggaggatgagagcaagaagaaatcagtattcgacggtaaacgcgcaatcgtggccctgaaatggaaaggcattgaattacgtggcatcgaatttgacttgttgatcgcttcatatctcctgaatccctcgcaaagcacggaagatgtcgcaagcgtggccaagaccaaacagtacatggcagtacagagtgatgaagcagtctatggaaaaggtgcgaaacaaacggtgccagatgaaaacgttttagccgaacatctggtgcgtaaagctgctgcaattcgcgccctggagaaagaactgatccacgatttgcaggaaaatgaacaatacgccctgtttactgaccttgaattacctctgtcctcggtcctggcagagatggaatttaccggtgtgaaagtagatgttgaacgcctgaaagaaatgggcgaggagctcacagaacaactgcgccaagtggagcaggaaatctataagttagctggccaagaattcaacattaacagccctaaacaactgggtgtcattctgtttgaaaaattacagcttcccgtcctgaagaagacgaagaccggctatagtacgagtgctgatgtgctcgagaaacttgccccgcagcatgaaatcgtcgagaaaattcttcactaccgtcagctcggtaaactgcaatccacatatattgaagggctgctgaaagttgtacatcgcgacacccataaagtccacaccatcttcaaccaggccctgactcaaaccgggcgcctgtcaagcaccgaacctaatctccagaacatcccaattcgtctggaagaaggccgcaaaattcgccaagcatttgtgccatcggaacctgactgggttatctttagcgcagattactcacagattgagctccgtgttctcgcacacattgcaaacgatgaaaatctgatcgatgcttttcgtcatgaccttgacatccatacgaagacagccatggatattttccatgtaacagcagatgaagttacccccaatatgcgtcgccaagcaaaagccgtgaacttcggtattgtctatgggatctctgattacggtctgagtcagcgtcttaatatcccacgcaaagaagccgccgaatttattcgtcgttatttcgaaagctttcccggcgttaaacagtacatggagaatattgtacaggaagccaaacagaaaggatacgtcaccacccttttacaccgccgccgctatctgccagacatcacctctcgtaatttcaacttacgttcattcgcagaacgcacggccatgaacaccccaattcaaggatcagccgccgacatcatcaagaaggcaatgattgatttagctgatcgtctgaaacgcgagaaacttcaagctcgtatgctgctccaggttcatgacgaactgattcttgaagctcctcgtgaggaagtcgaacgcctgcagcagattgtacccgaggtcatggagaacgccatccagttaaccgtcccactgaaagttgattatcactacggtcctacgtggtacgacgctaag

SEQ ID NO: 122 - protein, 604 aa, synthetic construct
  REGION 1..604: note = Variant of DNA polymerase
MHHHHHHGGSGMVAPQTKKEEAVLPNINYTIVEEVTEPILADRSALVVEVLGSNYHKAPILGFALANEHGNFFIRTDTALSSPLFTAWLEDESKKKSVFDGKRAIVALKWKGIELRGIEFDLLIASYLLNPSQSTEDVASVAKTKQYMAVQSDEAVYGKGAKQTVPDENVLAEHLVRKAAAIRALEKELIHDLQENEQYALFTDLELPLSSVLAEMEFTGVKVDVERLKEMGEELTEQLRQVEQEIYKLAGQEFNINSPKQLGVILFEKLQLPVLKKTKTGYSTSADVLEKLAPQHEIVEKILHYRQLGKLQSTYIEGLLKVVHRDTHKVHTIFNQALTQTGRLSSTEPNLQNIPIRLEEGRKIRQAFVPSEPDWVIFSADYSQIELRVLAHIANDENLIDAFRHDLDIHTKTAMDIFHVTADEVTPNMRRQAKAVNFGIVYGISDYGLSQRLNIPRKEAAEFIRRYFESFPGVKQYMENIVQEAKQKGYVTTLLHRRRYLPDITSRNFNLRSFAERTAMNTPIQGSAADIIKKAMIDLADRLKREKLQARMLLQVHDELILEAPREEVERLQQIVPEVMENAIQLTVPLKVDYHYGPTWYDAK

SEQ ID NO: 123 - DNA, 1812 bp, synthetic construct
  misc_feature 1..1812: note = Variant of DNA polymerase
  source 1..1812: mol_type = other DNA
atgcatcaccatcaccatcacggtggcagcggtatggttgcaccacagaccaaaaaagaagaagccgtactgccgaacatcaattatacaattgtggaggaagtcaccgaaccgattctcgcggatcgttcggcgttagtggttgaggttctggagtccaactaccataaggctccgatcctgggctttgccctggccaatgaacacggtaacttcttcattcgcactgacacggctctttcttctccgctgtttaccgcgtggctggaggatgagagcaagaagaaatcagtattcgacggtaaacgcgcaatcgtggccctgaaatggaaaggcattgaattacgtggcatcgaatttgacttgttgctggcttcatatctcctgaatccctcgcaaagcacggaagatgtcgcaagcgtggccaagaccaaacagtacatggcagtacagagtgatgaagcagtctatggaaaaggtgcgaaacaaacggtgccagatgaaaacgttttagccgaacatctggtgcgtaaagctgctgcaattcgcgccctggagaaagaactgatccacgatttgcaggaaaatgaacaatacgccctgtttactgaccttgaattacctctgtcctcgatcctggcagagatggaatttaccggtgtgaaagtagatgttgaacgcctgaaagaaatgggcgaggagctcacagaacaactgcgccaagtggagcaggaaatctataagttagctggccaagaattcaacattaacagccctaaacaactgggtgtcattctgtttgaaaaattacagcttcccgtcctgaagaagacgaagaccggctatagtacgagtgctgatgtgctcgagaaacttgcccgtcagcatgaaatcgtcgagaaaattcttcactaccgtcagctcggtaaactgcaatccacatatattgaagggctgctgaaagttgtacatcgcgacacccataaagtccacaccatcttcaaccaggccctgactcaaaccgggcgcctgtcaagcaccgaacctaatctccagaacatcccaattcgtctggaagaaggccgcaaaattcgccaagcatttgtgccatcggaacctgactgggttatctttagcgcagattactcacagattgagctccgtgttctcgcacacctggcaaacgatgaaaatctgatcgatgcttttcgtcatgaccttgacatccatacgaagacagccatggatattttccatgtaacagcagatgaagttacccccaatatgcgtcgccaagcaaaagccgtgaacttcggtattgtctatgggatctctgattacggtctgagtcagcgtcttaatatcccacgcaaagaagccgccgaatttattcgtcgttatttcgaaagctttcccggcgttaaacagtacatggagaatattgtacaagaagccaaacagaaaggatacgtcaccacccttttacaccgccgccgctatctgccagacatcacctctcgtaatttcaacttacgttcattcgcagaacgcacggccatgaacaccccaattcaaggatcagccgccgacatcatcaagaaggcaatgattgatttagctgatcgtctgaaacgcgagaaacttcaagctcgtatgctgctccaggttcatgacgaactgattcttgaagctcctcgtgaggaagtcgaacgcctgcagcagattgtacccgaggtcatggagaacgccatccagttaaccgtcccactgaaagttgattatcactacggtcctacgtggtacgacgctaag

SEQ ID NO: 124 - protein, 604 aa, synthetic construct
  REGION 1..604: note = Variant of DNA polymerase
MHHHHHHGGSGMVAPQTKKEEAVLPNINYTIVEEVTEPILADRSALVVEVLESNYHKAPILGFALANEHGNFFIRTDTALSSPLFTAWLEDESKKKSVFDGKRAIVALKWKGIELRGIEFDLLLASYLLNPSQSTEDVASVAKTKQYMAVQSDEAVYGKGAKQTVPDENVLAEHLVRKAAAIRALEKELIHDLQENEQYALFTDLELPLSSILAEMEFTGVKVDVERLKEMGEELTEQLRQVEQEIYKLAGQEFNINSPKQLGVILFEKLQLPVLKKTKTGYSTSADVLEKLARQHEIVEKILHYRQLGKLQSTYIEGLLKVVHRDTHKVHTIFNQALTQTGRLSSTEPNLQNIPIRLEEGRKIRQAFVPSEPDWVIFSADYSQIELRVLAHLANDENLIDAFRHDLDIHTKTAMDIFHVTADEVTPNMRRQAKAVNFGIVYGISDYGLSQRLNIPRKEAAEFIRRYFESFPGVKQYMENIVQEAKQKGYVTTLLHRRRYLPDITSRNFNLRSFAERTAMNTPIQGSAADIIKKAMIDLADRLKREKLQARMLLQVHDELILEAPREEVERLQQIVPEVMENAIQLTVPLKVDYHYGPTWYDAK

SEQ ID NO: 125 - DNA, 1812 bp, synthetic construct
  misc_feature 1..1812: note = Variant of DNA polymerase
  source 1..1812: mol_type = other DNA
atgcatcaccatcaccatcacggtggcagcggtatggttgcaccacagaccaaaaaagaagaagccgtactgccgaacatcaattatacaattgtggaggaagtcaccgaaccgattctcgcggatcgttcggcgttagtggttgaggttctggggtccaactaccataaggctccgatcctgggctttgccctggccaatgaacacggtaacttcttcattcgcactgacacggctctttcttctccgctgtttaccgcgtggctggaggatgagagcaagaagaaatcagtattcgacggtaaacgcgcaatcgtggccctgaaatggaaaggcattgaattacgtggcatcgaatttgacttgttgatcgcttcatatctcctgaatccctcgcaaagcacggaagatgtcgcaagcgtggccaagaccaaacagtacatggcagtacagagtgatgaggcagtctatggaaaaggtgcgaaacaaacggtgccagatgaaaacgttttagccgaacatctggtgcgtaaagctgctgcaattcgcgccctggagaaagaactgatccacgatttgcaggaaaatgaacaatacgccctgtttactgaccttgaattacctctgtcctcgattctggcagagatggaatttaccggtgtgaaagtagatgttgaacgcctgaaagaaatgggcgaggagctcacagaacaactgcgccaagtggagcaggaaatctataagttagctggccaagaattcaacattaacagccctaaacaactgggtgtcattctgtttgaaaaattacagcttcccgtcctgaagaagacgaagaccggctatagtacgagtgctgatgtgctcgagaaacttgccccgcagcatgaaatcgtccgcaaaattcttcactaccgtcagctcggtaaactgcaatccacatatattgaagggctgctgaaagttgtacatcgcgacacccataaagtccacaccatcttcaaccaggccctgactcaaaccgggcgcctgtcaagcaccgaacctaatctccagaacatcccaattcgtctggaagaaggccgcaaaattcgccaagcatttgtgccatcggaacctgactgggttatctttagcgcagattactcacagattgagctccgtgttctcgcacacattgcaaacgatgaaaatctgatcgatgcttttcgtcatgaccttgacatccatacgaagacagccatggatattttccatgtaacagcagatgaagttacccccaatatgcgtcgccaagcaaaagccgtgaacttcggtattgtctatgggatctctgattacggtctgagtcagaatcttaatatcccacgcaaagaagccgccgaatttattcgtcgttatttcgaaagctttcccggcgttaaacagtacatggagaatattgtacaggaagccaaacagaaaggatacgtcaccacccttttacaccgccgccgctatctgccagacatcacctctcgtaatcgtaacttacgttcattcgcagaacgcacggccatgaacaccccaattcaaggatcagccgccgacatcatcaagaaggcaatgattgatttagctgatcgtctgaaacgcgagaaacttcaagctcgtatgctgctccaggttcatgacgaactgattcttgaagctcctcgtgaggaagtcgaacgcctgcagcagattgtacccgaggtcatggagaacgccatccagttaaccgtcccactgaaagttagctatcactacggtcctacgtggtacgacgctaag

SEQ ID NO: 126 - protein, 604 aa, synthetic construct
  REGION 1..604: note = Variant of DNA polymerase
MHHHHHHGGSGMVAPQTKKEEAVLPNINYTIVEEVTEPILADRSALVVEVLGSNYHKAPILGFALANEHGNFFIRTDTALSSPLFTAWLEDESKKKSVFDGKRAIVALKWKGIELRGIEFDLLIASYLLNPSQSTEDVASVAKTKQYMAVQSDEAVYGKGAKQTVPDENVLAEHLVRKAAAIRALEKELIHDLQENEQYALFTDLELPLSSILAEMEFTGVKVDVERLKEMGEELTEQLRQVEQEIYKLAGQEFNINSPKQLGVILFEKLQLPVLKKTKTGYSTSADVLEKLAPQHEIVRKILHYRQLGKLQSTYIEGLLKVVHRDTHKVHTIFNQALTQTGRLSSTEPNLQNIPIRLEEGRKIRQAFVPSEPDWVIFSADYSQIELRVLAHIANDENLIDAFRHDLDIHTKTAMDIFHVTADEVTPNMRRQAKAVNFGIVYGISDYGLSQNLNIPRKEAAEFIRRYFESFPGVKQYMENIVQEAKQKGYVTTLLHRRRYLPDITSRNRNLRSFAERTAMNTPIQGSAADIIKKAMIDLADRLKREKLQARMLLQVHDELILEAPREEVERLQQIVPEVMENAIQLTVPLKVSYHYGPTWYDAK

SEQ ID NO: 127 - DNA, 1812 bp, synthetic construct
  misc_feature 1..1812: note = Variant of DNA polymerase
  source 1..1812: mol_type = other DNA
atgcatcaccatcaccatcacggtggcagcggtatggttgcaccacagaccaaaaaagaagaggccgtactgccgaacatcaattatacaattgtggaggaagtcaccgaaccgattctcgcggatcgttcggcgttagtggttgaggttctggaatccaactaccataaggctccgatcctgggctttgccctggccaatgaacacggtaacttcttcattcgcactgacacggctctttcttctccgctgtttaccgcgtggctggaggatgagagcaagaagaaatcagtattcgacggtaaacgcgcaatcgtggccctgaaatggaaaggcattgaattacgtggcatcgaatttgacttgttgatcgcttcatatctcctgaatccctcgcaaagcacggaagatgtcgcaagcgtggccaagaccaaacagtacatggcagtacagcgcgatgaagcagtctatggaaaaggtgcgaaacaaacggtgccagatgaaaacgttttagccgaacatctggtgcgtaaagctgctgcaattcgcgccctggagaaagaactgatccacgatttgcaggaaaatgaacaatacgccctgtttactgaccttgaattacctctgtcctcgattctggcagagatggaatttaccggtgtgaaagtagatgttgaacgcctgaaagaaatgggcgaggagctcacagaacaactgcgccaagtggagcaggaaatctataagttagctggccaacgcttcaacattaacagccctaaacaactgggtgtcattctgtttgaaaaattacagcttcccgtcctgaagaagacgaagaccggctatagtacgagtgctcgcgtgctcgagaaacttgccccgcagcatgaaatcgtcgagaaaattcttcactaccgtcagctcggtaaactgcaatccacatatattgaagggctgctgaaagttgtacatcgcgacacccataaagtccacaccatcttcaaccaggccctgactcaaaccgggcgcctgtcaagcaccgaacctaatctccagaacatcccaattcgtctggaagaaggccgcaaaattcgccaagcatttgtgccatcggaacctgactgggttatctttagcgcagattactcacagattgagctccgtgttctcgcacacattgcaaacgatgaaaatctgatcgatgcttttcgtcatgaccttgacatccatacgaagacagccatggatattttccatgtaacagcagatgaagttacccccaatatgcgtcgccaagcaaaagccgtgaacttcggtattgtctatgggatctctgattacggtctgagtcagaaccttgggatcccacgcaaagaagccgccgaatttattcgtcgttatttcgaaagctttcccggcgttaaacagtacatggagaatattgtacaggaagccaaacagaaaggatacgtcaccacccttttacaccgccgccgctatctgccagacatcacctctcgtaatttcaacttacgttcattcgcagaacgcacggccatgaacaccccaattcaaggatcagccgccgacatcatcaagaaggcaatgattgatttagctcgtcgtctgaaacgcgagaaacttcaagctcgtatgctgctccaggttcatgacgaactgattcttgaagctcctcgtgaggaagtcgaacgcctgcagcagattgtacccgaggtcatggagaacgccgtccagttaaccgtcccactgaaagttgattatcactacggtcctacgtggtacgacgctaag

SEQ ID NO: 128 - protein, 604 aa, synthetic construct
  REGION 1..604: note = Variant of DNA polymerase
MHHHHHHGGSGMVAPQTKKEEAVLPNINYTIVEEVTEPILADRSALVVEVLESNYHKAPILGFALANEHGNFFIRTDTALSSPLFTAWLEDESKKKSVFDGKRAIVALKWKGIELRGIEFDLLIASYLLNPSQSTEDVASVAKTKQYMAVQRDEAVYGKGAKQTVPDENVLAEHLVRKAAAIRALEKELIHDLQENEQYALFTDLELPLSSILAEMEFTGVKVDVERLKEMGEELTEQLRQVEQEIYKLAGQRFNINSPKQLGVILFEKLQLPVLKKTKTGYSTSARVLEKLAPQHEIVEKILHYRQLGKLQSTYIEGLLKVVHRDTHKVHTIFNQALTQTGRLSSTEPNLQNIPIRLEEGRKIRQAFVPSEPDWVIFSADYSQIELRVLAHIANDENLIDAFRHDLDIHTKTAMDIFHVTADEVTPNMRRQAKAVNFGIVYGISDYGLSQNLGIPRKEAAEFIRRYFESFPGVKQYMENIVQEAKQKGYVTTLLHRRRYLPDITSRNFNLRSFAERTAMNTPIQGSAADIIKKAMIDLARRLKREKLQARMLLQVHDELILEAPREEVERLQQIVPEVMENAVQLTVPLKVDYHYGPTWYDAK

SEQ ID NO: 129 - DNA, 1812 bp, synthetic construct
  misc_feature 1..1812: note = Variant of DNA polymerase
  source 1..1812: mol_type = other DNA
atgcatcaccatcaccatcacggtggcagcggtatggttgcaccacagaccaaaaaagaagaagccgtactgccgaacatcaattatacaattgtggaggaagtcaccgaaccgattctcgcggatcgttcggcgttagtggttgaggttctggggtccaactaccataaggctccgatcctgggctttgccctggccaatgaacacggtaacttcttcattcgcactgacacggctctttcttctccgctgtttaccgcgtggctggaggatgagagcaagaagaaatcagtattcgacgctaaacgcgcaatcgtggccctgaaatggaaaggcattgaattacgtggcatcgaatttgacttgttgatcgcttcatatctcctgaatccctcgcaaagcacggaagatgtcgcaagcgtggccaagaccaaacagtacatggcagtacagagtgatgaggcagtctatggaaaaggtgcgaaacaaacggtgccagatgaaaacgttttagccgaacatctggtgcgtaaagctgctgcaattcgcgccctggagaaagaactgatccacgatttgcaggaaaatgaacaatacgccctgtttactgaccttgaattacctctgtcctcgattctggcagagatggaatttaccggtgtgaaagtagatgttgaacgcctgaaagaaatgggcgaggagctcacagaacaactgcgccaagtggagcaggaaatctataagttagctggccaagaattcaacattaacagccctaaacaactgggtgtcattctgtttgaaaaattacagcttcccgtcctgaagaagacgaagaccggctatagtacgagtgctgatgtgctcgagaaacttgccccgcagcatgaaatcgtcgagaaaattcttcactaccgtcagctcggtaaactgcaatccacatatattgaagggctgctgaaagttgtacatcgcgacacccataaagtccacaccatcttcaaccaggccctgactcaaaccgggcgcctgtcaagcaccgaacctaatctccagaacatcccaattcgtctggaagaaggccgcaaaattcgccaagcatttgtgccatcggaacctgactgggttatctttagcgcagattactcacagattgagctccgtgttctcgcacacattgcaaacgatgaaaatctgatcgatgcttttcgtcatgaccttgacatccatacgaagacagccatggatattttccatgtaacagcagatgaagttacccccaatatgcgtcgccaagcaaaagccgtgaacttcggtattgtctatgggatctctgattacggtctgagtcagagtcttaatatcccacgcaaagaagccgccgaatttattcgtcgttatttcgaaagctttcccggcgttaaacagtacatggagaatattgtacaagaagccaaacagaaaggatacgtcaccacccttttacaccgccgccgctatctgccagacatcacctctcgtaatcgtaacttacgttcattcgcagaacgcacggccatgaacaccccaattcaaggatcagccgccgacatcatcaagaaggcaatgattgatttagctgatcgtctgaaacgcgagaaacttcaagctcgtatgctgctccaggttcatgacgaactgattcttgaagctcctcgtgaggaagtcgaacgcctgcagcagattgtacccgaggtcatggagaacgccatccagttaaccgtcccactgaaagttgattatcactacggtcctacgtggtacgacgctaag

SEQ ID NO: 130 - protein, 604 aa, synthetic construct
  REGION 1..604: note = Variant of DNA polymerase
MHHHHHHGGSGMVAPQTKKEEAVLPNINYTIVEEVTEPILADRSALVVEVLGSNYHKAPILGFALANEHGNFFIRTDTALSSPLFTAWLEDESKKKSVFDAKRAIVALKWKGIELRGIEFDLLIASYLLNPSQSTEDVASVAKTKQYMAVQSDEAVYGKGAKQTVPDENVLAEHLVRKAAAIRALEKELIHDLQENEQYALFTDLELPLSSILAEMEFTGVKVDVERLKEMGEELTEQLRQVEQEIYKLAGQEFNINSPKQLGVILFEKLQLPVLKKTKTGYSTSADVLEKLAPQHEIVEKILHYRQLGKLQSTYIEGLLKVVHRDTHKVHTIFNQALTQTGRLSSTEPNLQNIPIRLEEGRKIRQAFVPSEPDWVIFSADYSQIELRVLAHIANDENLIDAFRHDLDIHTKTAMDIFHVTADEVTPNMRRQAKAVNFGIVYGISDYGLSQSLNIPRKEAAEFIRRYFESFPGVKQYMENIVQEAKQKGYVTTLLHRRRYLPDITSRNRNLRSFAERTAMNTPIQGSAADIIKKAMIDLADRLKREKLQARMLLQVHDELILEAPREEVERLQQIVPEVMENAIQLTVPLKVDYHYGPTWYDAK

SEQ ID NO: 131 - DNA, 1812 bp, synthetic construct
  misc_feature 1..1812: note = Variant of DNA polymerase
  source 1..1812: mol_type = other DNA
atgcatcaccatcaccatcacggtggcagcggtatggttgcaccacagaccaaaaaagaagaagccgtactgccgaacatcaattatacaattgtggaggaagtcaccgaaccgattctcgcggatcgttcggcgttagtggttgaggttctggggtccaactaccataaggctccgatcctgggctttgccctggccaatgaacacggtaacttcttcattcgcactgacacggctctttcttctccgctgtttaccgcgtggctggaggatgagagcaagaagaaatcagtattcgacggtaaacgcgcaatcgtggccctgaaatggaaaggcattgaattacgtggcatcgaatttgacttgttgatcgcttcatatctcctgaatccctcgcaaagcacggaagatgtcgcaagcgtggccaagaccaaacagtacatggcagtacagagtgattgggcagtctatggaaaaggtgcgaaacaaacggtgccagatgaaaacgttttagccgaacatctggtgcgtaaagctgctgcaattcgcgccctggagaaagaactgatccacgatttgcaggaaaatgaacaatacgccctgtttactgaccttgaattacctctgtcctcggtcctggcagagatggaatttaccggtgtgaaagtagatgttgaacgcctgaaagaaatgggcgaggagctcacagaacaactgcgccaagtggagcaggaaatctataagttagctggccaagaattcaacattaacagccctaaacaactgggtgtcattctgtttgaaaaattacagcttcccgtcctgaagaagacgaagaccggctatagtacgagtgctgatgtgctcgagaaacttgcccctcagcatgaaatcgtccgcaaaattcttcactaccgtcagctcggtaaactgcaatccacatatattgaagggctgctgaaagttgtacatcgcgacacccataaagtccacaccatcttcaaccaggccctgactcaaaccgggcgcctgtcaagcaccgaacctaatctccagaacatcccaattcgtctggaagaaggccgcaaaattcgccaagcatttgtgccatcgaaacctgactgggttatctttagcgcagattactcacagattgagctccgtgttctcgcacacctggcaaacgatgaaaatctgatcgatgcttttcgtcatgaccttgacatccatacgaagacagccatggatattttccatgtaacagcagatgaagttacccccaatatgcgtcgccaagcaaaagccgtgaacttcggtattgtctatgggatctctgattacggtctgagtcagaaccttaatatcccacgcaaagaagccgccgaatttattcgtcgttatttcgaaagctttcccggcgttaaacagtacatggagaatattgtacaggaagccaaacagaaaggatacgtcaccacccttttacaccgccgccgctatctgccagacatcacctctcgtaatcgtaacttacgttcattcgcagaacgcacggccatgaacaccccaattcaaggatcagccgccgacatcatcaagaaggcaatgattgatttagctgatcgtctgaaacgcgagaaacttcaagctcgtatgctgctccaggttcatgacgaactgattcttgaagctcctcgtgaggaagtcgaacgcctgcagcagattgtacccgaggtcatggagaacgccatccagttaaccgtcccactgaaagttgattatcactacggtcctacgtggtacgacgctaag

SEQ ID NO: 132 - protein, 604 aa, synthetic construct
  REGION 1..604: note = Variant of DNA polymerase
MHHHHHHGGSGMVAPQTKKEEAVLPNINYTIVEEVTEPILADRSALVVEVLGSNYHKAPILGFALANEHGNFFIRTDTALSSPLFTAWLEDESKKKSVFDGKRAIVALKWKGIELRGIEFDLLIASYLLNPSQSTEDVASVAKTKQYMAVQSDWAVYGKGAKQTVPDENVLAEHLVRKAAAIRALEKELIHDLQENEQYALFTDLELPLSSVLAEMEFTGVKVDVERLKEMGEELTEQLRQVEQEIYKLAGQEFNINSPKQLGVILFEKLQLPVLKKTKTGYSTSADVLEKLAPQHEIVRKILHYRQLGKLQSTYIEGLLKVVHRDTHKVHTIFNQALTQTGRLSSTEPNLQNIPIRLEEGRKIRQAFVPSKPDWVIFSADYSQIELRVLAHLANDENLIDAFRHDLDIHTKTAMDIFHVTADEVTPNMRRQAKAVNFGIVYGISDYGLSQNLNIPRKEAAEFIRRYFESFPGVKQYMENIVQEAKQKGYVTTLLHRRRYLPDITSRNRNLRSFAERTAMNTPIQGSAADIIKKAMIDLADRLKREKLQARMLLQVHDELILEAPREEVERLQQIVPEVMENAIQLTVPLKVDYHYGPTWYDAK

SEQ ID NO: 133 - DNA, 1812 bp, synthetic construct
  misc_feature 1..1812: note = Variant of DNA polymerase
  source 1..1812: mol_type = other DNA
atgcatcaccatcaccatcacggtggcagcggtatggttgcaccacagaccaaaaaagaaatggccgtactgccgaacatcaattatacaattgtggaggaagtcaccgaaccgattctcgcggatcgttcggcgttagtggttgaggttctggaatccaactaccataaggctccgatcctgggctttgccctggccaatgaacacggtaacttcttcattcgcactgacacggctctttcttctccgctgtttaccgcgtggctggaggatgagagcaagaagaaatcagtattcgacggtaaacgcgcaatcgtggccctgaaatggaaaggcattgaattacgtggcatcgaatttgacttgttgatcgcttcatatctcctgaatccctcgcaaagcacggaagatgtcgcaagcgtggccaagaccaaacagtacatggcagtacagagcgatgaagcagtctatggaaaaggtgcgaaacaaacggtgccagatgaaaacgttttagccgaacatctggtgcgtaaagctgctgcaattcgcgccctggagaaagaactgatccacgatttgcaggaaaatgaacaatacgccctgtttactgaccttgaattacctctgtcctcgattctggcagagatggaatttaccggtgtgaaagtagatgttgaacgcctgaaagaaatgggcgaggagctcacagaacaactgcgccaagtggagcaggaaatctataagttagctggccaacgcttcaacattaacagccctaaacaactgggtgtcattctgtttgaaaaattacagcttcccgtcctgaagaagacgaagaccggctatagtacgagtgctcgcgtgctcgagaaacttgccccgcagcatgaaatcgtcgagaaaattcttcactaccgtcagctcggtaaactgcaatccacatatattgaagggctgctgaaagttgtacatcgcgacacccataaagtccacaccatcttcaaccaggccctgactcaaaccgggcgcctgtcaagcaccgaacctaatctccagaacatcccaattcgtctggaagaaggccgcaaaattcgccaagcatttgtgccatcggaacctgactgggttatctttagcgcagattactcacagattgagctccgtgttctcgcacacattgcaaacgatgaaaatctgatcgatgcttttcgtcatgaccttgacatccatacgaagacagccatggatattttccatgtaacagcagatgaagttacccccaatatgcgtcgccaagcaaaagccgtgaacttcggtattgtctatgggatctctgattacggtctgagtcagaaccttgggatcccacgcaaagaagccgccgaatttattcgtcgttatttcgaaagctttcccggcgttaaacagtacatggagaatattgtacaggaagccaaacagaaaggatacgtcaccacccttttacaccgccgccgctatctgccagacatcacctctcgtaatttcaacttacgttcattcgcagaacgcacggccatgaacaccccaattcaaggatcagccgccgacatcatcaagaaggcaatgattgatttagctgatcgtctgaaacgcgagaaacttcaagctcgtatgctgctccaggttcatgacgaactgattcttgaagctcctcgtgaggaagtcgaacgcctgcagcagattgtacccgaggtcatggagaacgccgtccagttaaccgtcccactgaaagttgattatcactacggtcctacgtggtacgacgctaag

SEQ ID NO: 134 - protein, 604 aa, synthetic construct
  REGION 1..604: note = Variant of DNA polymerase
MHHHHHHGGSGMVAPQTKKEMAVLPNINYTIVEEVTEPILADRSALVVEVLESNYHKAPILGFALANEHGNFFIRTDTALSSPLFTAWLEDESKKKSVFDGKRAIVALKWKGIELRGIEFDLLIASYLLNPSQSTEDVASVAKTKQYMAVQSDEAVYGKGAKQTVPDENVLAEHLVRKAAAIRALEKELIHDLQENEQYALFTDLELPLSSILAEMEFTGVKVDVERLKEMGEELTEQLRQVEQEIYKLAGQRFNINSPKQLGVILFEKLQLPVLKKTKTGYSTSARVLEKLAPQHEIVEKILHYRQLGKLQSTYIEGLLKVVHRDTHKVHTIFNQALTQTGRLSSTEPNLQNIPIRLEEGRKIRQAFVPSEPDWVIFSADYSQIELRVLAHIANDENLIDAFRHDLDIHTKTAMDIFHVTADEVTPNMRRQAKAVNFGIVYGISDYGLSQNLGIPRKEAAEFIRRYFESFPGVKQYMENIVQEAKQKGYVTTLLHRRRYLPDITSRNFNLRSFAERTAMNTPIQGSAADIIKKAMIDLADRLKREKLQARMLLQVHDELILEAPREEVERLQQIVPEVMENAVQLTVPLKVDYHYGPTWYDAK

SEQ ID NO: 135 - DNA, 1812 bp, synthetic construct
  misc_feature 1..1812: note = Variant of DNA polymerase
  source 1..1812: mol_type = other DNA
atgcatcaccatcaccatcacggtggcagcggtatggttgcaccacagaccaaaaaagaagaagccgtactgccgaacatcaattatacaattgtggaggaagtcaccgaaccgattctcgcggatcgttcggcgttagtggttgaggttctggggtccaactaccataaggctccgatcctgggctttgccctggccaatgaacacggtaacttcttcattcgcactgacacggctctttcttctccgctgtttaccgcgtggctggaggatgagagcaagaagaaatcagtattcgacggtaaacgcgcaatcgtggccctgaaatggaaaggcattgaattacgtggcatcgaatttgacttgttgattgcttcatatctcctgaatccctcgcaaagcacggaagatgtcgcaagcgtggccaagaccaaacagtacatggcagtacagagtgatgaggcagtctatggaaaaggtgcgaaacaaacggtgccagatgaaaacgttttagccgaacatctggtgcgtaaagctgctgcaattcgcgccctggagaaagaactgatccacgatttgcaggaaaatgaacaatacgccctgtttactgaccttgaattacctctgtcctcgatcctggcagagatggaatttaccggtgtgaaagtagatgttgaacgcctgaaagaaatgggcgaggagctcacagaacaactgcgccaagtggagcaggaaatctataagttagctggccaagaattcaacattaacagccctaaacaactgggtgtcattctgtttgaaaaattacagcttcccgtcctgaagaagacgaagaccggctatagtacgagtgctgatgtgctcgagaaacttgccccgcagcatgaaatcgtcgagaaaattcttcactaccgtcagctcggtaaactgcaatccacatatattgaagggctgctgaaagttgtacatcgcgacacccataaagtccacaccatcttcaaccaggccctgactcaaaccgggcgcctgtcaagcaccgaacctaatctccagaacatcccaattcgtctggaagaaggccgcaaaattcgccaagcatttgtgccatcggaacctgactgggttatctttagcgcagattactcacagattgagctccgtgttctcgcacacctggcaaacgatgaaaatctgatcgatgcttttcgtcatgaccttgacatccatacgaagacagccatggatattttccatgtaacagcagatgaagttacccccaatatgcgtcgccaagcaaaagccgtgaacttcggtattgtctatgggatctctgattacggtctgagtcagcgtcttaatatcccacgcaaagaagccgccgaatttattcgtcgttatttcgaaagctttcccggcgttaaacagtacatggagaatattgtacaggaagccaaacagaaaggatacgtcaccacccttttacaccgccgccgctatctgccagacatcacctctcgtaatttcaacttacgttcattcgcagaacgcacggccatgaacaccccaattcaaggatcagccgccgacatcatcaagaaggcaatgattgatttagctgatcgtctgaaacgcgagaaacttcaagctcgtatgctgctccaggttcatgacgaactgattcttgaagctcctcgtgaggaagtcgaacgcctgcagcagattgtacccgaggtcatggagaacgccatccagttaaccgtcccactgaaagttgattatcactacggtcctacgtggtacgacgctaag

SEQ ID NO: 136 - protein, 604 aa, synthetic construct
  REGION 1..604: note = Variant of DNA polymerase
MHHHHHHGGSGMVAPQTKKEEAVLPNINYTIVEEVTEPILADRSALVVEVLGSNYHKAPILGFALANEHGNFFIRTDTALSSPLFTAWLEDESKKKSVFDGKRAIVALKWKGIELRGIEFDLLIASYLLNPSQSTEDVASVAKTKQYMAVQSDEAVYGKGAKQTVPDENVLAEHLVRKAAAIRALEKELIHDLQENEQYALFTDLELPLSSILAEMEFTGVKVDVERLKEMGEELTEQLRQVEQEIYKLAGQEFNINSPKQLGVILFEKLQLPVLKKTKTGYSTSADVLEKLAPQHEIVEKILHYRQLGKLQSTYIEGLLKVVHRDTHKVHTIFNQALTQTGRLSSTEPNLQNIPIRLEEGRKIRQAFVPSEPDWVIFSADYSQIELRVLAHLANDENLIDAFRHDLDIHTKTAMDIFHVTADEVTPNMRRQAKAVNFGIVYGISDYGLSQRLNIPRKEAAEFIRRYFESFPGVKQYMENIVQEAKQKGYVTTLLHRRRYLPDITSRNFNLRSFAERTAMNTPIQGSAADIIKKAMIDLADRLKREKLQARMLLQVHDELILEAPREEVERLQQIVPEVMENAIQLTVPLKVDYHYGPTWYDAK

SEQ ID NO: 137 - DNA, 1812 bp, synthetic construct
  misc_feature 1..1812: note = Variant of DNA polymerase
  source 1..1812: mol_type = other DNA
atgcatcaccatcaccatcacggtggcagcggtatggttgcaccacagaccaaaaaagaagaagccgtactgccgaacatcaattatacaattgtggaggaagtcaccgaaccgattctcgcggatcgttcggcgttagtggttgaggttctggggtccaactaccataaggctccgatcctgggctttgccctggccaatgaacacggtaacttcttcattcgcactgacacggctctttcttctccgctgtttaccgcgtggctggaggatgagagcaagaagaaatcagtattcgacggtaaacgcgcaatcgtggccctgaaatggaaaggcattgaattacgtggcatcgaatttgacttgttgctggcttcatatctcctgaatccctcgcaaagcacggaagatgtcgcaagcgtggccaagaccaaacagtacatggcagtacagagtgattgggcagtctatggaaaaggtgcgaaacaaacggtgccagatgaaaacgttttagccgaacatctggtgcgtaaagctgctgcaattcgcgccctggagaaagaactgatccacgatttgcaggaaaatgaacaatacgccctgtttactgaccttgaattacctctgtcctcgattctggcagagatggaatttaccggtgtgaaagtagatgttgaacgcctgaaagaaatgggcgaggagctcacagaacaactgcgccaagtggagcaggaaatctataagttagctggccaagaattcaacattaacagccctaaacaactgggtgtcattctgtttgaaaaattacagcttcccgtcctgaagaagacgaagaccggctatagtacgagtgctgatgtgctcgagaaacttgcccgtcagcatgaaatcgtcgagaaaattcttcactaccgtcagctcggtaaactgcaatccacatatattgaagggctgctgaaagttgtacatcgcgacacccataaagtccacaccatcttcaaccaggccctgactcaaaccgggcgcctgtcaagcaccgaacctaatctccagaacatcccaattcgtctggaagaaggccgcaaaattcgccaagcatttgtgccatcggaacctgactgggttatctttagcgcagattactcacagattgagctccgtgttctcgcacacattgcaaacgatgaaaatctgatcgatgcttttcgtcatgaccttgacatccatacgaagacagccatggatattttccatgtaacagcagatgaagttacccccaatatgcgtcgccaagcaaaagccgtgaacttcggtattgtctatgggatctctgattacggtctgagtcagaatcttaatatcccacgcaaagaagccgccgaatttattcgtcgttatttcgaaagctttcccggcgttaaacagtacatggagaatattgtacaagaagccaaacagaaaggatacgtcaccacccttttacaccgccgccgctatctgccagacatcacctctcgtaatcgtaacttacgttcattcgcagaacgcacggccatgaacaccccaattcaaggatcagccgccgacatcatcaagaaggcaatgattgatttagctgatcgtctgaaacgcgagaaacttcaagctcgtatgctgctccaggttcatgacgaactgattcttgaagctcctcgtgaggaagtcgaacgcctgcagcagattgtacccgaggtcatggagaacgccatccagttaaccgtcccactgaaagttgattatcactacggtcctacgtggtacgacgctaag

SEQ ID NO: 138 - protein, 604 aa, synthetic construct
  REGION 1..604: note = Variant of DNA polymerase
MHHHHHHGGSGMVAPQTKKEEAVLPNINYTIVEEVTEPILADRSALVVEVLGSNYHKAPILGFALANEHGNFFIRTDTALSSPLFTAWLEDESKKKSVFDGKRAIVALKWKGIELRGIEFDLLLASYLLNPSQSTEDVASVAKTKQYMAVQSDWAVYGKGAKQTVPDENVLAEHLVRKAAAIRALEKELIHDLQENEQYALFTDLELPLSSILAEMEFTGVKVDVERLKEMGEELTEQLRQVEQEIYKLAGQEFNINSPKQLGVILFEKLQLPVLKKTKTGYSTSADVLEKLARQHEIVEKILHYRQLGKLQSTYIEGLLKVVHRDTHKVHTIFNQALTQTGRLSSTEPNLQNIPIRLEEGRKIRQAFVPSEPDWVIFSADYSQIELRVLAHIANDENLIDAFRHDLDIHTKTAMDIFHVTADEVTPNMRRQAKAVNFGIVYGISDYGLSQNLNIPRKEAAEFIRRYFESFPGVKQYMENIVQEAKQKGYVTTLLHRRRYLPDITSRNRNLRSFAERTAMNTPIQGSAADIIKKAMIDLADRLKREKLQARMLLQVHDELILEAPREEVERLQQIVPEVMENAIQLTVPLKVDYHYGPTWYDAK

SEQ ID NO: 139 - DNA, 1812 bp, synthetic construct
  misc_feature 1..1812: note = Variant of DNA polymerase
  source 1..1812: mol_type = other DNA
atgcatcaccatcaccatcacggtggcagcggtatggttgcaccacagaccaaaaaagaagaagccgtactgccgaacatcaattatacaattgtggaggaagtcaccgaaccgattctcgcggatcgttcggcgttagtggttgaggttctggagtccaactaccataaggctccgatcctgggctttgccctggccaatgaacacggtaacttcttcattcgcactgacacggctctttcttctccgctgtttaccgcgtggctggaggatgagagcaagaagaaatcagtattcgacgctaaacgcgcaatcgtggccctgaaatggaaaggcattgaattacgtggcatcgaatttgacttgttgctggcttcatatctcctgaatccctcgcaaagcacggaagatgtcgcaagcgtggccaagaccaaacagtacatggcagtacagagtgatgaggcagtctatggaaaaggtgcgaaacaaacggtgccagatgaaaacgttttagccgaacatctggtgcgtaaagctgctgcaattcgcgccctggagaaagaactgatccacgatttgcaggaaaatgaacaatacgccctgtttactgaccttgaattacctctgtcctcggtcctggcagagatggaatttaccggtgtgaaagtagatgttgaacgcctgaaagaaatgggcgaggagctcacagaacaactgcgccaagtggagcaggaaatctataagttagctggccaagaattcaacattaacagccctaaacaactgggtgtcattctgtttgaaaaattacagcttcccgtcctgaagaagacgaagaccggctatagtacgagtgctgatgtgctcgagaaacttgccccgcagcatgaaatcgtccgcaaaattcttcactaccgtcagctcggtaaactgcaatccacatatattgaagggctgctgaaagttgtacatcgcgacacccataaagtccacaccatcttcaaccaggccctgactcaaaccgggcgcctgtcaagcaccgaacctaatctccagaacatcccaattcgtctggaagaaggccgcaaaattcgccaagcatttgtgccatcggaacctgactgggttatctttagcgcagattactcacagattgagctccgtgttctcgcacacctggcaaacgatgaaaatctgatcgatgcttttcgtcatgaccttgacatccatacgaagacagccatggatattttccatgtaacagcagatgaagttacccccaatatgcgtcgccaagcaaaagccgtgaacttcggtattgtctatgggatctctgattacggtctgagtcagaatcttaatatcccacgcaaagaagccgccgaatttattcgtcgttatttcgaaagctttcccggcgttaaacagtacatggagaatattgtacaggaagccaaacagaaaggatacgtcaccacccttttacaccgccgccgctatctgccagacatcacctctcgtaatttcaacttacgttcattcgcagaacgcacggccatgaacaccccaattcaaggatcagccgccgacatcatcaagaaggcaatgattgatttagctgatcgtctgaaacgcgagaaacttcaagctcgtatgctgctccaggttcatgacgaactgattcttgaagctcctcgtgaggaagtcgaacgcctgcagcagattgtacccgaggtcatggagaacgccatccagttaaccgtcccactgaaagttgattatcactacggtcctacgtggtacgacgctaag

SEQ ID NO: 140 - protein, 604 aa, synthetic construct
  REGION 1..604: note = Variant of DNA polymerase
MHHHHHHGGSGMVAPQTKKEEAVLPNINYTIVEEVTEPILADRSALVVEVLESNYHKAPILGFALANEHGNFFIRTDTALSSPLFTAWLEDESKKKSVFDAKRAIVALKWKGIELRGIEFDLLLASYLLNPSQSTEDVASVAKTKQYMAVQSDEAVYGKGAKQTVPDENVLAEHLVRKAAAIRALEKELIHDLQENEQYALFTDLELPLSSVLAEMEFTGVKVDVERLKEMGEELTEQLRQVEQEIYKLAGQEFNINSPKQLGVILFEKLQLPVLKKTKTGYSTSADVLEKLAPQHEIVRKILHYRQLGKLQSTYIEGLLKVVHRDTHKVHTIFNQALTQTGRLSSTEPNLQNIPIRLEEGRKIRQAFVPSEPDWVIFSADYSQIELRVLAHLANDENLIDAFRHDLDIHTKTAMDIFHVTADEVTPNMRRQAKAVNFGIVYGISDYGLSQNLNIPRKEAAEFIRRYFESFPGVKQYMENIVQEAKQKGYVTTLLHRRRYLPDITSRNFNLRSFAERTAMNTPIQGSAADIIKKAMIDLADRLKREKLQARMLLQVHDELILEAPREEVERLQQIVPEVMENAIQLTVPLKVDYHYGPTWYDAK

SEQ ID NO: 141 - DNA, 1812 bp, synthetic construct
  misc_feature 1..1812: note = Variant of DNA polymerase
  source 1..1812: mol_type = other DNA
atgcatcaccatcaccatcacggtggcagcggtatggttgcaccacagaccaaaaaagaagaagccgtactgccgaacatcaattatacaattgtggaggaagtcaccgaaccgattctcgcggatcgttcggcgttagtggttgaggttctggagtccaactaccataaggctccgatcctgggctttgccctggccaatgaacacggtaacttcttcattcgcactgacacggctctttcttctccgctgtttaccgcgtggctggaggatgagagcaagaagaaatcagtattcgacggtaaacgcgcaatcgtggccctgaaatggaaaggcattgaattacgtggcatcgaatttgacttgttgctggcttcatatctcctgaatccctcgcaaagcacggaagatgtcgcaagcgtggccaagaccaaacagtacatggcagtacagagtgatgaggcagtctatggaaaaggtgcgaaacaaacggtgccagatgaaaacgttttagccgaacatctggtgcgtaaagctgctgcaattcgcgccctggagaaagaactgatccacgatttgcaggaaaatgaacaatacgccctgtttactgaccttgaattacctctgtcctcgattctggcagagatggaatttaccggtgtgaaagtagatgttgaacgcctgaaagaaatgggcgaggagctcacagaacaactgcgccaagtggagcaggaaatctataagttagctggccaagaattcaacattaacagccctaaacaactgggtgtcattctgtttgaaaaattacagcttcccgtcctgaagaagacgaagaccggctatagtacgagtgctgatgtgctcgagaaacttgcccgtcagcatgaaatcgtcgggaaaattcttcactaccgtcagctcggtaaactgcaatccacatatattgaagggctgctgaaagttgtacatcgcgacacccataaagtccacaccatcttcaaccaggccctgactcaaaccgggcgcctgtcaagcaccgaacctaatctccagaacatcccaattcgtctggaagaaggccgcaaaattcgccaagcatttgtgccatcgaaacctgactgggttatctttagcgcagattactcacagattgagctccgtgttctcgcacacattgcaaacgatgaaaatctgatcgatgcttttcgtcatgaccttgacatccatacgaagacagccatggatattttccatgtaacagcagatgaagttacccccaatatgcgtcgccaagcaaaagccgtgaacttcggtattgtctatgggatctctgattacggtctgagtcagagtcttaatatcccacgcaaagaagccgccgaatttattcgtcgttatttcgaaagctttcccggcgttaaacagtacatggagaatattgtacaagaagccaaacagaaaggatacgtcaccacccttttacaccgccgccgctatctgccagacatcacctctcgtaatcgtaacttacgttcattcgcagaacgcacggccatgaacaccccaattcaaggatcagccgccgacatcatcaagaaggcaatgattgatttagctgatcgtctgaaacgcgagaaacttcaagctcgtatgctgctccaggttcatgacgaactgattcttgaagctcctcgtgaggaagtcgaacgcctgcagcagattgtacccgaggtcatggagaacgccatccagttaaccgtcccactgaaagttagctatcactacggtcctacgtggtacgacgctaag

SEQ ID NO: 142 - protein, 604 aa, synthetic construct
  REGION 1..604: note = Variant of DNA polymerase
MHHHHHHGGSGMVAPQTKKEEAVLPNINYTIVEEVTEPILADRSALVVEVLESNYHKAPILGFALANEHGNFFIRTDTALSSPLFTAWLEDESKKKSVFDGKRAIVALKWKGIELRGIEFDLLLASYLLNPSQSTEDVASVAKTKQYMAVQSDEAVYGKGAKQTVPDENVLAEHLVRKAAAIRALEKELIHDLQENEQYALFTDLELPLSSILAEMEFTGVKVDVERLKEMGEELTEQLRQVEQEIYKLAGQEFNINSPKQLGVILFEKLQLPVLKKTKTGYSTSADVLEKLARQHEIVGKILHYRQLGKLQSTYIEGLLKVVHRDTHKVHTIFNQALTQTGRLSSTEPNLQNIPIRLEEGRKIRQAFVPSKPDWVIFSADYSQIELRVLAHIANDENLIDAFRHDLDIHTKTAMDIFHVTADEVTPNMRRQAKAVNFGIVYGISDYGLSQSLNIPRKEAAEFIRRYFESFPGVKQYMENIVQEAKQKGYVTTLLHRRRYLPDITSRNRNLRSFAERTAMNTPIQGSAADIIKKAMIDLADRLKREKLQARMLLQVHDELILEAPREEVERLQQIVPEVMENAIQLTVPLKVSYHYGPTWYDAK

SEQ ID NO: 143 - DNA, 1812 bp, synthetic construct
  misc_feature 1..1812: note = Variant of DNA polymerase
  source 1..1812: mol_type = other DNA
atgcatcaccatcaccatcacggtggcagcggtatggttgcaccacagaccaaaaaagaagaagccgtactgccgaacatcaattatacaattgtggaggaagtcaccgaaccgattctcgcggatcgttcggcgttagtggttgaggttctggggtccaactaccataaggctccgatcctgggctttgccctggccaatgaacacggtaacttcttcattcgcactgacacggctctttcttctccgctgtttaccgcgtggctggaggatgagagcaagaagaaatcagtattcgacggtaaacgcgcaatcgtggccctgaaatggaaaggcattgaattacgtggcatcgaatttgacttgttgctggcttcatatctcctgaatccctcgcaaagcacggaagatgtcgcaagcgtggccaagaccaaacagtacatggcagtacagagtgattgggcagtctatggaaaaggtgcgaaacaaacggtgccagatgaaaacgttttagccgaacatctggtgcgtaaagctgctgcaattcgcgccctggagaaagaactgatccacgatttgcaggaaaatgaacaatacgccctgtttactgaccttgaattacctctgtcctcgattctggcagagatggaatttaccggtgtgaaagtagatgttgaacgcctgaaagaaatgggcgaggagctcacagaacaactgcgccaagtggagcaggaaatctataagttagctggccaagaattcaacattaacagccctaaacaactgggtgtcattctgtttgaaaaattacagcttcccgtcctgaagaagacgaagaccggctatagtacgagtgctgatgtgctcgagaaacttgcccgtcagcatgaaatcgtcgagaaaattcttcactaccgtcagctcggtaaactgcaatccacatatattgaagggctgctgaaagttgtacatcgcgacacccataaagtccacaccatcttcaaccaggccctgactcaaaccgggcgcctgtcaagcaccgaacctaatctccagaacatcccaattcgtctggaagaaggccgcaaaattcgccaagcatttgtgccatcggaacctgactgggttatctttagcgcagattactcacagattgagctccgtgttctcgcacacattgcaaacgatgaaaatctgatcgatgcttttcgtcatgaccttgacatccatacgaagacagccatggatattttccatgtaacagcagatgaagttacccccaatatgcgtcgccaagcaaaagccgtgaacttcggtattgtctatgggatctctgattacggtctgagtcagaatcttaatatcccacgcaaagaagccgccgaatttattcgtcgttatttcgaaagctttcccggcgttaaacagtacatggagaatattgtaaaagaagccaaacagaaaggatacgtcaccacccttttacaccgccgccgctatctgccagacatcacctctcgtaatttcaacttacgttcattcgcagaacgcacggccatgaacaccccaattcaaggatcagccgccgacatcatcaagaaggcaatgattgatttagctgatcgtctgaaacgcgagaaacttcaagctcgtatgctgctccaggttcatgacgaactgattcttgaagctcctcgtgaggaagtcgaacgcctgcagcagattgtacccgaggtcatggagaacgccatccagttaaccgtcccactgaaagttagctatcactacggtcctacgtggtacgacgctaag

SEQ ID NO: 144 - protein, 604 aa, synthetic construct
  REGION 1..604: note = Variant of DNA polymerase
MHHHHHHGGSGMVAPQTKKEEAVLPNINYTIVEEVTEPILADRSALVVEVLGSNYHKAPILGFALANEHGNFFIRTDTALSSPLFTAWLEDESKKKSVFDGKRAIVALKWKGIELRGIEFDLLLASYLLNPSQSTEDVASVAKTKQYMAVQSDWAVYGKGAKQTVPDENVLAEHLVRKAAAIRALEKELIHDLQENEQYALFTDLELPLSSILAEMEFTGVKVDVERLKEMGEELTEQLRQVEQEIYKLAGQEFNINSPKQLGVILFEKLQLPVLKKTKTGYSTSADVLEKLARQHEIVEKILHYRQLGKLQSTYIEGLLKVVHRDTHKVHTIFNQALTQTGRLSSTEPNLQNIPIRLEEGRKIRQAFVPSEPDWVIFSADYSQIELRVLAHIANDENLIDAFRHDLDIHTKTAMDIFHVTADEVTPNMRRQAKAVNFGIVYGISDYGLSQNLNIPRKEAAEFIRRYFESFPGVKQYMENIVKEAKQKGYVTTLLHRRRYLPDITSRNFNLRSFAERTAMNTPIQGSAADIIKKAMIDLADRLKREKLQARMLLQVHDELILEAPREEVERLQQIVPEVMENAIQLTVPLKVSYHYGPTWYDAK

SEQ ID NO: 145 - DNA, 1812 bp, synthetic construct
  misc_feature 1..1812: note = Variant of DNA polymerase
  source 1..1812: mol_type = other DNA
atgcatcaccatcaccatcacggtggcagcggtatggttgcaccacagaccaaaaaagaagaagccgtactgccgaacatcaattatacaattgtggaggaagtcaccgaaccgattctcgcggatcgttcggcgttagtggttgaggttctggggtccaactaccataaggctccgatcctgggctttgccctggccaatgaacacggtaacttcttcattcgcactgacacggctctttcttctccgctgtttaccgcgtggctggaggatgagagcaagaagaaatcagtattcgacggtaaacgcgcaatcgtggccctgaaatggaaaggcattgaattacgtggcatcgaatttgacttgttgattgcttcatatctcctgaatccctcgcaaagcacggaagatgtcgcaagcgtggccaagaccaaacagtacatggcagtacagagtgatgaggcagtctatggaaaaggtgcgaaacaaacggtgccagatgaaaacgttttagccgaacatctggtgcgtaaagctgctgcaattcgcgccctggagaaagaactgatccacgatttgcaggaaaatgaacaatacgccctgtttactgaccttgaattacctctgtcctcgatcctggcagagatggaatttaccggtgtgaaagtagatgttgaacgcctgaaagaaatgggcgaggagctcacagaacaactgcgccaagtggagcaggaaatctataagttagctggccaagaattcaacattaacagccctaaacaactgggtgtcattctgtttgaaaaattacagcttcccgtcctgaagaagacgaagaccggctatagtacgagtgctgatgtgctcgagaaacttgccccgcagcatgaaatcgtcgagaaaattcttcactaccgtcagctcggtaaactgcaatccacatatattgaagggctgctgaaagttgtacatcgcgacacccataaagtccacaccatcttcaaccaggccctgactcaaaccgggcgcctgtcaagcaccgaacctaatctccagaacatcccaattcgtctggaagaaggccgcaaaattcgccaagcatttgtgccatcgaaacctgactgggttatctttagcgcagattactcacagattgagctccgtgttctcgcacacctggcaaacgatgaaaatctgatcgatgcttttcgtcatgaccttgacatccatacgaagacagccatggatattttccatgtaacagcagatgaagttacccccaatatgcgtcgccaagcaaaagccgtgaacttcggtattgtctatgggatctctgattacggtctgagtcagagtcttaatatcccacgcaaagaagccgccgaatttattcgtcgttatttcgaaagctttcccggcgttaaacagtacatggagaatattgtacaagaagccaaacagaaaggatacgtcaccacccttttacaccgccgccgctatctgccagacatcacctctcgtaatcgtaacttacgttcattcgcagaacgcacggccatgaacaccccaattcaaggatcagccgccgacatcatcaagaaggcaatgattgatttagctgatcgtctgaaacgcgagaaacttcaagctcgtatgctgctccaggttcatgacgaactgattcttgaagctcctcgtgaggaagtcgaacgcctgcagcagattgtacccgaggtcatggagaacgccatccagttaaccgtcccactgaaagttagctatcactacggtcctacgtggtacgacgctaag

SEQ ID NO: 146 - protein, 604 aa, synthetic construct
  REGION 1..604: note = Variant of DNA polymerase
MHHHHHHGGSGMVAPQTKKEEAVLPNINYTIVEEVTEPILADRSALVVEVLGSNYHKAPILGFALANEHGNFFIRTDTALSSPLFTAWLEDESKKKSVFDGKRAIVALKWKGIELRGIEFDLLIASYLLNPSQSTEDVASVAKTKQYMAVQSDEAVYGKGAKQTVPDENVLAEHLVRKAAAIRALEKELIHDLQENEQYALFTDLELPLSSILAEMEFTGVKVDVERLKEMGEELTEQLRQVEQEIYKLAGQEFNINSPKQLGVILFEKLQLPVLKKTKTGYSTSADVLEKLAPQHEIVEKILHYRQLGKLQSTYIEGLLKVVHRDTHKVHTIFNQALTQTGRLSSTEPNLQNIPIRLEEGRKIRQAFVPSKPDWVIFSADYSQIELRVLAHLANDENLIDAFRHDLDIHTKTAMDIFHVTADEVTPNMRRQAKAVNFGIVYGISDYGLSQSLNIPRKEAAEFIRRYFESFPGVKQYMENIVQEAKQKGYVTTLLHRRRYLPDITSRNRNLRSFAERTAMNTPIQGSAADIIKKAMIDLADRLKREKLQARMLLQVHDELILEAPREEVERLQQIVPEVMENAIQLTVPLKVSYHYGPTWYDAK

SEQ ID NO: 147 - DNA, 1812 bp, synthetic construct
  misc_feature 1..1812: note = Variant of DNA polymerase
  source 1..1812: mol_type = other DNA
atgcatcaccatcaccatcacggtggcagcggtatggttgcaccacagaccaaaaaagaagaagccgtactgccgaacatcaattatacaattgtggaggaagtcaccgaaccgattctcgcggatcgttcggcgttagtggttgaggttctggagtccaactaccataaggctccgatcctgggctttgccctggccaatgaacacggtaacttcttcattcgcactgacacggctctttcttctccgctgtttaccgcgtggctggaggatgagagcaagaagaaatcagtattcgacggtaaacgcgcaatcgtggccctgaaatggaaaggcattgaattacgtggcatcgaatttgacttgttgattgcttcatatctcctgaatccctcgcaaagcacggaagatgtcgcaagcgtggccaagaccaaacagtacatggcagtacagagtgattgggcagtctatggaaaaggtgcgaaacaaacggtgccagatgaaaacgttttagccgaacatctggtgcgtaaagctgctgcaattcgcgccctggagaaagaactgatccacgatttgcaggaaaatgaacaatacgccctgtttactgaccttgaattacctctgtcctcgatcctggcagagatggaatttaccggtgtgaaagtagatgttgaacgcctgaaagaaatgggcgaggagctcacagaacaactgcgccaagtggagcaggaaatctataagttagctggccaagaattcaacattaacagccctaaacaactgggtgtcattctgtttgaaaaattacagcttcccgtcctgaagaagacgaagaccggctatagtacgagtgctgatgtgctcgagaaacttgcccctcagcatgaaatcgtccgcaaaattcttcactaccgtcagctcggtaaactgcaatccacatatattgaagggctgctgaaagttgtacatcgcgacacccataaagtccacaccatcttcaaccaggccctgactcaaaccgggcgcctgtcaagcaccgaacctaatctccagaacatcccaattcgtctggaagaaggccgcaaaattcgccaagcatttgtgccatcggaacctgactgggttatctttagcgcagattactcacagattgagctccgtgttctcgcacacctggcaaacgatgaaaatctgatcgatgcttttcgtcatgaccttgacatccatacgaagacagccatggatattttccatgtaacagcagatgaagttacccccaatatgcgtcgccaagcaaaagccgtgaacttcggtattgtctatgggatctctgattacggtctgagtcagagtcttaatatcccacgcaaagaagccgccgaatttattcgtcgttatttcgaaagctttcccggcgttaaacagtacatggagaatattgtacaggaagccaaacagaaaggatacgtcaccacccttttacaccgccgccgctatctgccagacatcacctctcgtaatttcaacttacgttcattcgcagaacgcacggccatgaacaccccaattcaaggatcagccgccgacatcatcaagaaggcaatgattgatttagctgatcgtctgaaacgcgagaaacttcaagctcgtatgctgctccaggttcatgacgaactgattcttgaagctcctcgtgaggaagtcgaacgcctgcagcagattgtacccgaggtcatggagaacgccatccagttaaccgtcccactgaaagttagctatcactacggtcctacgtggtacgacgctaag

SEQ ID NO: 148 - protein, 604 aa, synthetic construct
  REGION 1..604: note = Variant of DNA polymerase
MHHHHHHGGSGMVAPQTKKEEAVLPNINYTIVEEVTEPILADRSALVVEVLESNYHKAPILGFALANEHGNFFIRTDTALSSPLFTAWLEDESKKKSVFDGKRAIVALKWKGIELRGIEFDLLIASYLLNPSQSTEDVASVAKTKQYMAVQSDWAVYGKGAKQTVPDENVLAEHLVRKAAAIRALEKELIHDLQENEQYALFTDLELPLSSILAEMEFTGVKVDVERLKEMGEELTEQLRQVEQEIYKLAGQEFNINSPKQLGVILFEKLQLPVLKKTKTGYSTSADVLEKLAPQHEIVRKILHYRQLGKLQSTYIEGLLKVVHRDTHKVHTIFNQALTQTGRLSSTEPNLQNIPIRLEEGRKIRQAFVPSEPDWVIFSADYSQIELRVLAHLANDENLIDAFRHDLDIHTKTAMDIFHVTADEVTPNMRRQAKAVNFGIVYGISDYGLSQSLNIPRKEAAEFIRRYFESFPGVKQYMENIVQEAKQKGYVTTLLHRRRYLPDITSRNFNLRSFAERTAMNTPIQGSAADIIKKAMIDLADRLKREKLQARMLLQVHDELILEAPREEVERLQQIVPEVMENAIQLTVPLKVSYHYGPTWYDAK

SEQ ID NO: 149 - DNA, 1812 bp, synthetic construct
  misc_feature 1..1812: note = Variant of DNA polymerase
  source 1..1812: mol_type = other DNA
atgcatcaccatcaccatcacggtggcagcggtatggttgcaccacagaccaaaaaagaagaagccgtactgccgaacatcaattatacaattgtggaggaagtcaccgaaccgattctcgcggatcgttcggcgttagtggttgaggttctggggtccaactaccataaggctccgatcctgggctttgccctggccaatgaacacggtaacttcttcattcgcactgacacggctctttcttctccgctgtttaccgcgtggctggaggatgagagcaagaagaaatcagtattcgacgctaaacgcgcaatcgtggccctgaaatggaaaggcattgaattacgtggcatcgaatttgacttgttgatcgcttcatatctcctgaatccctcgcaaagcacggaagatgtcgcaagcgtggccaagaccaaacagtacatggcagtacagagtgatgaggcagtctatggaaaaggtgcgaaacaaacggtgccagatgaaaacgttttagccgaacatctggtgcgtaaagctgctgcaattcgcgccctggagaaagaactgatccacgatttgcaggaaaatgaacaatacgccctgtttactgaccttgaattacctctgtcctcgatcctggcagagatggaatttaccggtgtgaaagtagatgttgaacgcctgaaagaaatgggcgaggagctcacagaacaactgcgccaagtggagcaggaaatctataagttagctggccaagaattcaacattaacagccctaaacaactgggtgtcattctgtttgaaaaattacagcttcccgtcctgaagaagacgaagaccggctatagtacgagtgctgatgtgctcgagaaacttgcccgtcagcatgaaatcgtcgagaaaattcttcactaccgtcagctcggtaaactgcaatccacatatattgaagggctgctgaaagttgtacatcgcgacacccataaagtccacaccatcttcaaccaggccctgactcaaaccgggcgcctgtcaagcaccgaacctaatctccagaacatcccaattcgtctggaagaaggccgcaaaattcgccaagcatttgtgccatcgaaacctgactgggttatctttagcgcagattactcacagattgagctccgtgttctcgcacacctggcaaacgatgaaaatctgatcgatgcttttcgtcatgaccttgacatccatacgaagacagccatggatattttccatgtaacagcagatgaagttacccccaatatgcgtcgccaagcaaaagccgtgaacttcggtattgtctatgggatctctgattacggtctgagtcagagtcttaatatcccacgcaaagaagccgccgaatttattcgtcgttatttcgaaagctttcccggcgttaaacagtacatggagaatattgtacaggaagccaaacagaaaggatacgtcaccacccttttacaccgccgccgctatctgccagacatcacctctcgtaatcgtaacttacgttcattcgcagaacgcacggccatgaacaccccaattcaaggatcagccgccgacatcatcaagaaggcaatgattgatttagctgatcgtctgaaacgcgagaaacttcaagctcgtatgctgctccaggttcatgacgaactgattcttgaagctcctcgtgaggaagtcgaacgcctgcagcagattgtacccgaggtcatggagaacgccatccagttaaccgtcccactgaaagttgattatcactacggtcctacgtggtacgacgctaag

SEQ ID NO: 150 - protein, 604 aa, synthetic construct
  REGION 1..604: note = Variant of DNA polymerase
MHHHHHHGGSGMVAPQTKKEEAVLPNINYTIVEEVTEPILADRSALVVEVLGSNYHKAPILGFALANEHGNFFIRTDTALSSPLFTAWLEDESKKKSVFDAKRAIVALKWKGIELRGIEFDLLIASYLLNPSQSTEDVASVAKTKQYMAVQSDEAVYGKGAKQTVPDENVLAEHLVRKAAAIRALEKELIHDLQENEQYALFTDLELPLSSILAEMEFTGVKVDVERLKEMGEELTEQLRQVEQEIYKLAGQEFNINSPKQLGVILFEKLQLPVLKKTKTGYSTSADVLEKLARQHEIVEKILHYRQLGKLQSTYIEGLLKVVHRDTHKVHTIFNQALTQTGRLSSTEPNLQNIPIRLEEGRKIRQAFVPSKPDWVIFSADYSQIELRVLAHLANDENLIDAFRHDLDIHTKTAMDIFHVTADEVTPNMRRQAKAVNFGIVYGISDYGLSQSLNIPRKEAAEFIRRYFESFPGVKQYMENIVQEAKQKGYVTTLLHRRRYLPDITSRNRNLRSFAERTAMNTPIQGSAADIIKKAMIDLADRLKREKLQARMLLQVHDELILEAPREEVERLQQIVPEVMENAIQLTVPLKVDYHYGPTWYDAK

SEQ ID NO: 151 - DNA, 1812 bp, synthetic construct
  misc_feature 1..1812: note = Variant of DNA polymerase
  source 1..1812: mol_type = other DNA
atgcatcaccatcaccatcacggtggcagcggtatggttgcaccacagaccaaaaaagaaatggccgtactgccgaacatcaattatacaattgtggaggaagtcaccgaaccgattctcgcggatcgttcggcgttagtggttgaggttctggaatccaactaccataaggctccgatcctgggctttgccctggccaatgaacacggtaacttcttcattcgcactgacacggctctttcttctccgctgtttaccgcgtggctggaggatgagagcaagaagaaatcagtattcgacggtaaacgcgcaatcgtggccctgaaatggaaaggcattgaattacgtggcatcgaatttgacttgttgatcgcttcatatctcctgaatccctcgcaaagcacggaagatgtcgcaagcgtggccaagaccaaacagtacatggcagtacagcgcgatgaagcagtctatggaaaaggtgcgaaacaaacggtgccagatgaaaacgttttagccgaacatctggtgcgtaaagctgctgcaattcgcgccctggagaaagaactgatccacgatttgcaggaaaatgaacaatacgccctgtttactgaccttgaattacctctgtcctcgattctggcagagatggaatttaccggtgtgaaagtagatgttgaacgcctgaaagaaatgggcgaggagctcacagaacaactgcgccaagtggagcaggaaatctataagttagctggccaacgcttcaacattaacagccctaaacaactgggtgtcattctgtttgaaaaattacagcttcccgtcctgaagaagacgaagaccggctatagtacgagtgctcgcgtgctcgagaaacttgccccgcagcatgaaatcgtcgagaaaattcttctgtaccgtcagctcggtaaactgcaatccacatatattgaagggctgctgaaagttgtacatcgcgacacccataaagtccacaccatcttcaaccaggccctgactcaaaccgggcgcctgtcaagcaccgaacctaatctccagaacatcccaattcgtctggaagaaggccgcaaaattcgccaagcatttgtgccatcggaacctgactgggttatctttagcgcagattactcacagattgagctccgtgttctcgcacacattgcaaacgatgaaaatctgatcgatgcttttcgtcatgaccttgacatccatacgaagacagccatggatattttccatgtaacagcagatgaagttacccccaatatgcgtcgccaagcaaaagccgtgaacttcggtattgtctatgggatctctgattacggtctgagtcagaaccttgggatcccacgcaaagaagccgccgaatttattcgtcgttatttcgaaagctttcccggcgttaaacagtacatggagaatattgtacaggaagccaaacagaaaggatacgtcaccacccttttacaccgccgccgctatctgccagacatccactctcgtaatttcaacttacgttcattcgcagaacgcacggccatgaacaccccaattcaaggatcagccgccgacatcatcaagaaggcaatgattgatttagctgaccgtctgaaacgcgagaaacttcaagctcgtatgctgctccaggttcatgacgaactgattcttgaagctcctcgtgaggaagtcgaacgcctgcagcagattgtacccgaggtcatggagaacgccatccagttaaccgtcccactgaaagttgattatcactacggtcctacgtggtacgacgctaag

SEQ ID NO: 152 - protein, 604 aa, synthetic construct
  REGION 1..604: note = Variant of DNA polymerase
MHHHHHHGGSGMVAPQTKKEMAVLPNINYTIVEEVTEPILADRSALVVEVLESNYHKAPILGFALANEHGNFFIRTDTALSSPLFTAWLEDESKKKSVFDGKRAIVALKWKGIELRGIEFDLLIASYLLNPSQSTEDVASVAKTKQYMAVQRDEAVYGKGAKQTVPDENVLAEHLVRKAAAIRALEKELIHDLQENEQYALFTDLELPLSSILAEMEFTGVKVDVERLKEMGEELTEQLRQVEQEIYKLAGQRFNINSPKQLGVILFEKLQLPVLKKTKTGYSTSARVLEKLAPQHEIVEKILLYRQLGKLQSTYIEGLLKVVHRDTHKVHTIFNQALTQTGRLSSTEPNLQNIPIRLEEGRKIRQAFVPSEPDWVIFSADYSQIELRVLAHIANDENLIDAFRHDLDIHTKTAMDIFHVTADEVTPNMRRQAKAVNFGIVYGISDYGLSQNLGIPRKEAAEFIRRYFESFPGVKQYMENIVQEAKQKGYVTTLLHRRRYLPDIHSRNFNLRSFAERTAMNTPIQGSAADIIKKAMIDLADRLKREKLQARMLLQVHDELILEAPREEVERLQQIVPEVMENAIQLTVPLKVDYHYGPTWYDAK

SEQ ID NO: 153 - DNA, 1812 bp, synthetic construct
  misc_feature 1..1812: note = Variant of DNA polymerase
  source 1..1812: mol_type = other DNA
atgcatcaccatcaccatcacggtggcagcggtatggttgcaccacagaccaaaaaagaagaagccgtactgccgaacatcaattatacaattgtggaggaagtcaccgaaccgattctcgcggatcgttcggcgttagtggttgaggttctggggtccaactaccataaggctccgatcctgggctttgccctggccaatgaacacggtaacttcttcattcgcactgacacggctctttcttctccgctgtttaccgcgtggctggaggatgagagcaagaagaaatcagtattcgacggtaaacgcgcaatcgtggccctgaaatggaaaggcattgaattacgtggcatcgaatttgacttgttgatcgcttcatatctcctgaatccctcgcaaagcacggaagatgtcgcaagcgtggccaagaccaaacagtacatggcagtacagagtgatgaagcagtctatggaaaaggtgcgaaacaaacggtgccagatgaaaacgttttagccgaacatctggtgcgtaaagctgctgcaattcgcgccctggagaaagaactgatccacgatttgcaggaaaatgaacaatacgccctgtttactgaccttgaattacctctgtcctcgattctggcagagatggaatttaccggtgtgaaagtagatgttgaacgcctgaaagaaatgggcgaggagctcacagaacaactgcgccaagtggagcaggaaatctataagttagctggccaagaattcaacattaacagccctaaacaactgggtgtcattctgtttgaaaaattacagcttcccgtcctgaagaagacgaagaccggctatagtacgagtgctgatgtgctcgagaaacttgccccgcagcatgaaatcgtccgcaaaattcttcactaccgtcagctcggtaaactgcaatccacatatattgaagggctgctgaaagttgtacatcgcgacacccataaagtccacaccatcttcaaccaggccctgactcaaaccgggcgcctgtcaagcaccgaacctaatctccagaacatcccaattcgtctggaagaaggccgcaaaattcgccaagcatttgtgccatcggaacctgactgggttatctttagcgcagattactcacagattgagctccgtgttctcgcacacctggcaaacgatgaaaatctgatcgatgcttttcgtcatgaccttgacatccatacgaagacagccatggatattttccatgtaacagcagatgaagttacccccaatatgcgtcgccaagcaaaagccgtgaacttcggtattgtctatgggatctctgattacggtctgagtcagaaccttaatatcccacgcaaagaagccgccgaatttattcgtcgttatttcgaaagctttcccggcgttaaacagtacatggagaatattgtacaggaagccaaacagaaaggatacgtcaccacccttttacaccgccgccgctatctgccagacatcacctctcgtaatttcaacttacgttcattcgcagaacgcacggccatgaacaccccaattcaaggatcagccgccgacatcatcaagaaggcaatgattgatttagctgatcgtctgaaacgcgagaaacttcaagctcgtatgctgctccaggttcatgacgaactgattcttgaagctcctcgtgaggaagtcgaacgcctgcagcagattgtacccgaggtcatggagaacgccatccagttaaccgtcccactgaaagttgattatcactacggtcctacgtggtacgacgctaag

SEQ ID NO: 154 - protein, 604 aa, synthetic construct
  REGION 1..604: note = Variant of DNA polymerase
MHHHHHHGGSGMVAPQTKKEEAVLPNINYTIVEEVTEPILADRSALVVEVLGSNYHKAPILGFALANEHGNFFIRTDTALSSPLFTAWLEDESKKKSVFDGKRAIVALKWKGIELRGIEFDLLIASYLLNPSQSTEDVASVAKTKQYMAVQSDEAVYGKGAKQTVPDENVLAEHLVRKAAAIRALEKELIHDLQENEQYALFTDLELPLSSILAEMEFTGVKVDVERLKEMGEELTEQLRQVEQEIYKLAGQEFNINSPKQLGVILFEKLQLPVLKKTKTGYSTSADVLEKLAPQHEIVRKILHYRQLGKLQSTYIEGLLKVVHRDTHKVHTIFNQALTQTGRLSSTEPNLQNIPIRLEEGRKIRQAFVPSEPDWVIFSADYSQIELRVLAHLANDENLIDAFRHDLDIHTKTAMDIFHVTADEVTPNMRRQAKAVNFGIVYGISDYGLSQNLNIPRKEAAEFIRRYFESFPGVKQYMENIVQEAKQKGYVTTLLHRRRYLPDITSRNFNLRSFAERTAMNTPIQGSAADIIKKAMIDLADRLKREKLQARMLLQVHDELILEAPREEVERLQQIVPEVMENAIQLTVPLKVDYHYGPTWYDAK

SEQ ID NO: 155 - DNA, 1812 bp, synthetic construct
  misc_feature 1..1812: note = Variant of DNA polymerase
  source 1..1812: mol_type = other DNA
atgcatcaccatcaccatcacggtggcagcggtatggttgcaccacagaccaaaaaagaagaagccgtactgccgaacatcaattatacaattgtggaggaagtcaccgaaccgattctcgcggatcgttcggcgttagtggttgaggttctggagtccaactaccataaggctccgatcctgggctttgccctggccaatgaacacggtaacttcttcattcgcactgacacggctctttcttctccgctgtttaccgcgtggctggaggatgagagcaagaagaaatcagtattcgacgctaaacgcgcaatcgtggccctgaaatggaaaggcattgaattacgtggcatcgaatttgacttgttgctggcttcatatctcctgaatccctcgcaaagcacggaagatgtcgcaagcgtggccaagaccaaacagtacatggcagtacagagtgattgggcagtctatggaaaaggtgcgaaacaaacggtgccagatgaaaacgttttagccgaacatctggtgcgtaaagctgctgcaattcgcgccctggagaaagaactgatccacgatttgcaggaaaatgaacaatacgccctgtttactgaccttgaattacctctgtcctcgatcctggcagagatggaatttaccggtgtgaaagtagatgttgaacgcctgaaagaaatgggcgaggagctcacagaacaactgcgccaagtggagcaggaaatctataagttagctggccaagaattcaacattaacagccctaaacaactgggtgtcattctgtttgaaaaattacagcttcccgtcctgaagaagacgaagaccggctatagtacgagtgctgatgtgctcgagaaacttgcccgtcagcatgaaatcgtcgagaaaattcttcactaccgtcagctcggtaaactgcaatccacatatattgaagggctgctgaaagttgtacatcgcgacacccataaagtccacaccatcttcaaccaggccctgactcaaaccgggcgcctgtcaagcaccgaacctaatctccagaacatcccaattcgtctggaagaaggccgcaaaattcgccaagcatttgtgccatcggaacctgactgggttatctttagcgcagattactcacagattgagctccgtgttctcgcacacattgcaaacgatgaaaatctgatcgatgcttttcgtcatgaccttgacatccatacgaagacagccatggatattttccatgtaacagcagatgaagttacccccaatatgcgtcgccaagcaaaagccgtgaacttcggtattgtctatgggatctctgattacggtctgagtcagagtcttaatatcccacgcaaagaagccgccgaatttattcgtcgttatttcgaaagctttcccggcgttaaacagtacatggagaatattgtacaggaagccaaacagaaaggatacgtcaccacccttttacaccgccgccgctatctgccagacatcacctctcgtaatcgtaacttacgttcattcgcagaacgcacggccatgaacaccccaattcaaggatcagccgccgacatcatcaagaaggcaatgattgatttagctgatcgtctgaaacgcgagaaacttcaagctcgtatgctgctccaggttcatgacgaactgattcttgaagctcctcgtgaggaagtcgaacgcctgcagcagattgtacccgaggtcatggagaacgccatccagttaaccgtcccactgaaagttgattatcactacggtcctacgtggtacgacgctaag

SEQ ID NO: 156 - protein, 604 aa, synthetic construct
  REGION 1..604: note = Variant of DNA polymerase
MHHHHHHGGSGMVAPQTKKEEAVLPNINYTIVEEVTEPILADRSALVVEVLESNYHKAPILGFALANEHGNFFIRTDTALSSPLFTAWLEDESKKKSVFDAKRAIVALKWKGIELRGIEFDLLLASYLLNPSQSTEDVASVAKTKQYMAVQSDWAVYGKGAKQTVPDENVLAEHLVRKAAAIRALEKELIHDLQENEQYALFTDLELPLSSILAEMEFTGVKVDVERLKEMGEELTEQLRQVEQEIYKLAGQEFNINSPKQLGVILFEKLQLPVLKKTKTGYSTSADVLEKLARQHEIVEKILHYRQLGKLQSTYIEGLLKVVHRDTHKVHTIFNQALTQTGRLSSTEPNLQNIPIRLEEGRKIRQAFVPSEPDWVIFSADYSQIELRVLAHIANDENLIDAFRHDLDIHTKTAMDIFHVTADEVTPNMRRQAKAVNFGIVYGISDYGLSQSLNIPRKEAAEFIRRYFESFPGVKQYMENIVQEAKQKGYVTTLLHRRRYLPDITSRNRNLRSFAERTAMNTPIQGSAADIIKKAMIDLADRLKREKLQARMLLQVHDELILEAPREEVERLQQIVPEVMENAIQLTVPLKVDYHYGPTWYDAK

SEQ ID NO: 157 - DNA, 1812 bp, synthetic construct
  misc_feature 1..1812: note = Variant of DNA polymerase
  source 1..1812: mol_type = other DNA
atgcatcaccatcaccatcacggtggcagcggtatggttgcaccacagaccaaaaaagaagaagccgtactgccgaacatcaattatacaattgtggaggaagtcaccgaaccgattctcgcggatcgttcggcgttagtggttgaggttctggagtccaactaccataaggctccgatcctgggctttgccctggccaatgaacacggtaacttcttcattcgcactgacacggctctttcttctccgctgtttaccgcgtggctggaggatgagagcaagaagaaatcagtattcgacggtaaacgcgcaatcgtggccctgaaatggaaaggcattgaattacgtggcatcgaatttgacttgttgattgcttcatatctcctgaatccctcgcaaagcacggaagatgtcgcaagcgtggccaagaccaaacagtacatggcagtacagagtgattgggcagtctatggaaaaggtgcgaaacaaacggtgccagatgaaaacgttttagccgaacatctggtgcgtaaagctgctgcaattcgcgccctggagaaagaactgatccacgatttgcaggaaaatgaacaatacgccctgtttactgaccttgaattacctctgtcctcggtcctggcagagatggaatttaccggtgtgaaagtagatgttgaacgcctgaaagaaatgggcgaggagctcacagaacaactgcgccaagtggagcaggaaatctataagttagctggccaagaattcaacattaacagccctaaacaactgggtgtcattctgtttgaaaaattacagcttcccgtcctgaagaagacgaagaccggctatagtacgagtgctgatgtgctcgagaaacttgcccctcagcatgaaatcgtcgagaaaattcttcactaccgtcagctcggtaaactgcaatccacatatattgaagggctgctgaaagttgtacatcgcgacacccataaagtccacaccatcttcaaccaggccctgactcaaaccgggcgcctgtcaagcaccgaacctaatctccagaacatcccaattcgtctggaagaaggccgcaaaattcgccaagcatttgtgccatcgaaacctgactgggttatctttagcgcagattactcacagattgagctccgtgttctcgcacacctggcaaacgatgaaaatctgatcgatgcttttcgtcatgaccttgacatccatacgaagacagccatggatattttccatgtaacagcagatgaagttacccccaatatgcgtcgccaagcaaaagccgtgaacttcggtattgtctatgggatctctgattacggtctgagtcagaatcttaatatcccacgcaaagaagccgccgaatttattcgtcgttatttcgaaagctttcccggcgttaaacagtacatggagaatattgtacaggaagccaaacagaaaggatacgtcaccacccttttacaccgccgccgctatctgccagacatcacctctcgtaatcgtaacttacgttcattcgcagaacgcacggccatgaacaccccaattcaaggatcagccgccgacatcatcaagaaggcaatgattgatttagctgatcgtctgaaacgcgagaaacttcaagctcgtatgctgctccaggttcatgacgaactgattcttgaagctcctcgtgaggaagtcgaacgcctgcagcagattgtacccgaggtcatggagaacgccatccagttaaccgtcccactgaaagttagctatcactacggtcctacgtggtacgacgctaag

SEQ ID NO: 158 - protein, 604 aa, synthetic construct
  REGION 1..604: note = Variant of DNA polymerase
MHHHHHHGGSGMVAPQTKKEEAVLPNINYTIVEEVTEPILADRSALVVEVLESNYHKAPILGFALANEHGNFFIRTDTALSSPLFTAWLEDESKKKSVFDGKRAIVALKWKGIELRGIEFDLLIASYLLNPSQSTEDVASVAKTKQYMAVQSDWAVYGKGAKQTVPDENVLAEHLVRKAAAIRALEKELIHDLQENEQYALFTDLELPLSSVLAEMEFTGVKVDVERLKEMGEELTEQLRQVEQEIYKLAGQEFNINSPKQLGVILFEKLQLPVLKKTKTGYSTSADVLEKLAPQHEIVEKILHYRQLGKLQSTYIEGLLKVVHRDTHKVHTIFNQALTQTGRLSSTEPNLQNIPIRLEEGRKIRQAFVPSKPDWVIFSADYSQIELRVLAHLANDENLIDAFRHDLDIHTKTAMDIFHVTADEVTPNMRRQAKAVNFGIVYGISDYGLSQNLNIPRKEAAEFIRRYFESFPGVKQYMENIVQEAKQKGYVTTLLHRRRYLPDITSRNRNLRSFAERTAMNTPIQGSAADIIKKAMIDLADRLKREKLQARMLLQVHDELILEAPREEVERLQQIVPEVMENAIQLTVPLKVSYHYGPTWYDAK

SEQ ID NO: 159 - DNA, 1812 bp, synthetic construct
  misc_feature 1..1812: note = Variant of DNA polymerase
  source 1..1812: mol_type = other DNA
atgcatcaccatcaccatcacggtggcagcggtatggttgcaccacagaccaaaaaagaaatggccgtactgccgaacatcaattatacaattgtggaggaagtcaccgaaccgattctcgcggatcgttcggcgttagtggttgaggttctggaatccaactaccataaggctccgatcctgggctttgccctggccaatgaacacggtaacttcttcattcgcactgacacggctctttcttctccgctgtttaccgcgtggctggaggatgagagcaagaagaaatcagtattcgacggtaaacgcgcaatcgtggccctgaaatggaaaggcattgaattacgtggcatcgaatttgacttgttgatcgcttcatatctcctgaatccctcgcaaagcacggaagatgtcgcaagcgtggccaagaccaaacagtacatggcagtacagagtgatgaagcagtctatggaaaaggtgcgaaacaaacggtgccagatgaaaacgttttagccgaacatctggtgcgtaaagctgctgcaattcgcgccctggagaaagaactgatccacgatttgcaggaaaatgaacaatacgccctgtttactgaccttgaattacctctgtcctcgattctggcagagatggaatttaccggtgtgaaagtagatgttgaacgcctgaaagaaatgggcgaggagctcacagaacaactgcgccaagtggagcaggaaatctataagttagctggccaacgcttcaacattaacagccctaaacaactgggtgtcattctgtttgaaaaattacagcttcccgtcctgaagaagacgaagaccggctatagtacgagtgctcgcgtgctcgagaaacttgccccgcagcatgaaatcgtcgagaaaattcttcactaccgtcagctcggtaaactgcaatccacatatattgaagggctgctgaaagttgtacatcgcgacacccataaagtccacaccatcttcaaccaggccctgactcaaaccgggcgcctgtcaagcaccgaacctaatctccagaacatcccaattcgtctggaagaaggccgcaaaattcgccaagcatttgtgccatcggaacctgactgggttatctttagcgcagattactcacagattgagctccgtgttctcgcacacattgcaaacgatgaaaatctgatcgatgcttttcgtcatgaccttgacatccatacgaagacagccatggatattttccatgtaacagcagatgaagttacccccaatatgcgtcgccaagcaaaagccgtgaacttcggtattgtctatgggatctctgattacggtctgagtcagaaccttgggatcccacgcaaagaagccgccgaatttattcgtcgttatttcgaaagctttcccggcgttaaacagtacatggagaatattgtacaggaagccaaacagaaaggatacgtcaccacccttttacaccgccgccgctatctgccagacatccactctcgtaatttcaacttacgttcattcgcagaacgcacggccatgaacaccccaattcaaggatcagccgccgacatcatcaagaaggcaatgattgatttagctggccgtctgaaacgcgagaaacttcaagctcgtatgctgctccaggttcatgacgaactgattcttgaagctcctcgtgaggaagtcgaacgcctgcagcagattgtacccgaggtcatggagaacgccatccagttaaccgtcccactgaaagttgattatcactacggtcctacgtggtacgacgctaag

SEQ ID NO: 160 - protein, 604 aa, synthetic construct
  REGION 1..604: note = Variant of DNA polymerase
MHHHHHHGGSGMVAPQTKKEMAVLPNINYTIVEEVTEPILADRSALVVEVLESNYHKAPILGFALANEHGNFFIRTDTALSSPLFTAWLEDESKKKSVFDGKRAIVALKWKGIELRGIEFDLLIASYLLNPSQSTEDVASVAKTKQYMAVQSDEAVYGKGAKQTVPDENVLAEHLVRKAAAIRALEKELIHDLQENEQYALFTDLELPLSSILAEMEFTGVKVDVERLKEMGEELTEQLRQVEQEIYKLAGQRFNINSPKQLGVILFEKLQLPVLKKTKTGYSTSARVLEKLAPQHEIVEKILHYRQLGKLQSTYIEGLLKVVHRDTHKVHTIFNQALTQTGRLSSTEPNLQNIPIRLEEGRKIRQAFVPSEPDWVIFSADYSQIELRVLAHIANDENLIDAFRHDLDIHTKTAMDIFHVTADEVTPNMRRQAKAVNFGIVYGISDYGLSQNLGIPRKEAAEFIRRYFESFPGVKQYMENIVQEAKQKGYVTTLLHRRRYLPDIHSRNFNLRSFAERTAMNTPIQGSAADIIKKAMIDLAGRLKREKLQARMLLQVHDELILEAPREEVERLQQIVPEVMENAIQLTVPLKVDYHYGPTWYDAK

SEQ ID NO: 161 - DNA, 1812 bp, synthetic construct
  misc_feature 1..1812: note = Variant of DNA polymerase
  source 1..1812: mol_type = other DNA
atgcatcaccatcaccatcacggtggcagcggtatggttgcaccacagaccaaaaaagaagaggccgtactgccgaacatcaattatacaattgtggaggaagtcaccgaaccgattctcgcggatcgttcggcgttagtggttgaggttctggaatccaactaccataaggctccgatcctgggctttgccctggccaatgaacacggtaacttcttcattcgcactgacacggctctttcttctccgctgtttaccgcgtggctggaggatgagagcaagaagaaatcagtattcgacggtaaacgcgcaatcgtggccctgaaatggaaaggcattgaattacgtggcatcgaatttgacttgttgatcgcttcatatctcctgaatccctcgcaaagcacggaagatgtcgcaagcgtggccaagaccaaacagtacatggcagtacagagtgatgaagcagtctatggaaaaggtgcgaaacaaacggtgccagatgaaaacgttttagccgaacatctggtgcgtaaagctgctgcaattcgcgccctggagaaagaactgatccacgatttgcaggaaaatgaacaatacgccctgtttactgaccttgaattacctctgtcctcgattctggcagagatggaatttaccggtgtgaaagtagatgttgaacgcctgaaagaaatgggcgaggagctcacagaacaactgcgccaagtggagcaggaaatctataagttagctggccaagaattcaacattaacagccctaaacaactgggtgtcattctgtttgaaaaattacagcttcccgtcctgaagaagacgaagaccggctatagtacgagtgctcgcgtgctcgagaaacttgccccgcagcatgaaatcgtcgagaaaattcttcattaccgtcagctcggtaaactgcaatccacatatattgaagggctgctgaaagttgtacatcgcgacacccataaagtccacaccatcttcaaccaggccctgactcaaaccgggcgcctgtcaagcaccgaacctaatctccagaacatcccaattcgtctggaagaaggccgcaaaattcgccaagcatttgtgccatcggaacctgactgggttatctttagcgcagattactcacagattgagctccgtgttctcgcacacattgcaaacgatgaaaatctgatcgatgcttttcgtcatgaccttgacatccatacgaagacagccatggatattttccatgtaacagcagatgaagttacccccaatatgcgtcgccaagcaaaagccgtgaacttcggtattgtctatgggatctctgattacggtctgagtcagaaccttgggatcccacgcaaagaagccgccgaatttattcgtcgttatttcgaaagctttcccggcgttaaacagtacatggagaatattgtacaggaagccaaacagaaaggatacgtcaccacccttttacaccgccgccgctatctgccagacatccactctcgtaatttcaacttacgttcattcgcagaacgcacggccatgaacaccccaattcaaggatcagccgccgacatcatcaagaaggcaatgattgatttagctgaccgtctgaaacgcgagaaacttcaagctcgtatgctgctccaggttcatgacgaactgattcttgaagctcctcgtgaggaagtcgaacgcctgcagcagattgtacccgaggtcatggagaacgccgtccagttaaccgtcccactgaaagttgattatcactacggtcctacgtggtacgacgctaag

SEQ ID NO: 162 - protein, 604 aa, synthetic construct
  REGION 1..604: note = Variant of DNA polymerase
MHHHHHHGGSGMVAPQTKKEEAVLPNINYTIVEEVTEPILADRSALVVEVLESNYHKAPILGFALANEHGNFFIRTDTALSSPLFTAWLEDESKKKSVFDGKRAIVALKWKGIELRGIEFDLLIASYLLNPSQSTEDVASVAKTKQYMAVQSDEAVYGKGAKQTVPDENVLAEHLVRKAAAIRALEKELIHDLQENEQYALFTDLELPLSSILAEMEFTGVKVDVERLKEMGEELTEQLRQVEQEIYKLAGQEFNINSPKQLGVILFEKLQLPVLKKTKTGYSTSARVLEKLAPQHEIVEKILHYRQLGKLQSTYIEGLLKVVHRDTHKVHTIFNQALTQTGRLSSTEPNLQNIPIRLEEGRKIRQAFVPSEPDWVIFSADYSQIELRVLAHIANDENLIDAFRHDLDIHTKTAMDIFHVTADEVTPNMRRQAKAVNFGIVYGISDYGLSQNLGIPRKEAAEFIRRYFESFPGVKQYMENIVQEAKQKGYVTTLLHRRRYLPDIHSRNFNLRSFAERTAMNTPIQGSAADIIKKAMIDLADRLKREKLQARMLLQVHDELILEAPREEVERLQQIVPEVMENAVQLTVPLKVDYHYGPTWYDAK

SEQ ID NO: 163 - DNA, 1812 bp, synthetic construct
  misc_feature 1..1812: note = Variant of DNA polymerase
  source 1..1812: mol_type = other DNA
atgcatcaccatcaccatcacggtggcagcggtatggttgcaccacagaccaaaaaagaagaagccgtactgccgaacatcaattatacaattgtggaggaagtcaccgaaccgattctcgcggatcgttcggcgttagtggttgaggttctggggtccaactaccataaggctccgatcctgggctttgccctggccaatgaacacggtaacttcttcattcgcactgacacggctctttcttctccgctgtttaccgcgtggctggaggatgagagcaagaagaaatcagtattcgacggtaaacgcgcaatcgtggccctgaaatggaaaggcattgaattacgtggcatcgaatttgacttgttgctggcttcatatctcctgaatccctcgcaaagcacggaagatgtcgcaagcgtggccaagaccaaacagtacatggcagtacagagtgatgaagcagtctatggaaaaggtgcgaaacaaacggtgccagatgaaaacgttttagccgaacatctggtgcgtaaagctgctgcaattcgcgccctggagaaagaactgatccacgatttgcaggaaaatgaacaatacgccctgtttactgaccttgaattacctctgtcctcgattctggcagagatggaatttaccggtgtgaaagtagatgttgaacgcctgaaagaaatgggcgaggagctcacagaacaactgcgccaagtggagcaggaaatctataagttagctggccaagaattcaacattaacagccctaaacaactgggtgtcattctgtttgaaaaattacagcttcccgtcctgaagaagacgaagaccggctatagtacgagtgctgatgtgctcgagaaacttgcccgtcagcatgaaatcgtccgcaaaattcttcactaccgtcagctcggtaaactgcaatccacatatattgaagggctgctgaaagttgtacatcgcgacacccataaagtccacaccatcttcaaccaggccctgactcaaaccgggcgcctgtcaagcaccgaacctaatctccagaacatcccaattcgtctggaagaaggccgcaaaattcgccaagcatttgtgccatcgaaacctgactgggttatctttagcgcagattactcacagattgagctccgtgttctcgcacacattgcaaacgatgaaaatctgatcgatgcttttcgtcatgaccttgacatccatacgaagacagccatggatattttccatgtaacagcagatgaagttacccccaatatgcgtcgccaagcaaaagccgtgaacttcggtattgtctatgggatctctgattacggtctgagtcagagtcttaatatcccacgcaaagaagccgccgaatttattcgtcgttatttcgaaagctttcccggcgttaaacagtacatggagaatattgtacaagaagccaaacagaaaggatacgtcaccacccttttacaccgccgccgctatctgccagacatcacctctcgtaatttcaacttacgttcattcgcagaacgcacggccatgaacaccccaattcaaggatcagccgccgacatcatcaagaaggcaatgattgatttagctgatcgtctgaaacgcgagaaacttcaagctcgtatgctgctccaggttcatgacgaactgattcttgaagctcctcgtgaggaagtcgaacgcctgcagcagattgtacccgaggtcatggagaacgccatccagttaaccgtcccactgaaagttgattatcactacggtcctacgtggtacgacgctaag

SEQ ID NO: 164 - protein, 604 aa, synthetic construct
  REGION 1..604: note = Variant of DNA polymerase
MHHHHHHGGSGMVAPQTKKEEAVLPNINYTIVEEVTEPILADRSALVVEVLGSNYHKAPILGFALANEHGNFFIRTDTALSSPLFTAWLEDESKKKSVFDGKRAIVALKWKGIELRGIEFDLLLASYLLNPSQSTEDVASVAKTKQYMAVQSDEAVYGKGAKQTVPDENVLAEHLVRKAAAIRALEKELIHDLQENEQYALFTDLELPLSSILAEMEFTGVKVDVERLKEMGEELTEQLRQVEQEIYKLAGQEFNINSPKQLGVILFEKLQLPVLKKTKTGYSTSADVLEKLARQHEIVRKILHYRQLGKLQSTYIEGLLKVVHRDTHKVHTIFNQALTQTGRLSSTEPNLQNIPIRLEEGRKIRQAFVPSKPDWVIFSADYSQIELRVLAHIANDENLIDAFRHDLDIHTKTAMDIFHVTADEVTPNMRRQAKAVNFGIVYGISDYGLSQSLNIPRKEAAEFIRRYFESFPGVKQYMENIVQEAKQKGYVTTLLHRRRYLPDITSRNFNLRSFAERTAMNTPIQGSAADIIKKAMIDLADRLKREKLQARMLLQVHDELILEAPREEVERLQQIVPEVMENAIQLTVPLKVDYHYGPTWYDAK

SEQ ID NO: 165 - DNA, 1812 bp, synthetic construct
  misc_feature 1..1812: note = Variant of DNA polymerase
  source 1..1812: mol_type = other DNA
atgcatcaccatcaccatcacggtggcagcggtatggttgcaccacagaccaaaaaagaagaagccgtactgccgaacatcaattatacaattgtggaggaagtcaccgaaccgattctcgcggatcgttcggcgttagtggttgaggttctggaatccaactaccataaggctccgatcctgggctttgccctggccaatgaacacggtaacttcttcattcgcactgacacggctctttcttctccgctgtttaccgcgtggctggaggatgagagcaagaagaaatcagtattcgacggtaaacgcgcaatcgtggccctgaaatggaaaggcattgaattacgtggcatcgaatttgacttgttgatcgcttcatatctcctgaatccctcgcaaagcacggaagatgtcgcaagcgtggccaagaccaaacagtacatggcagtacagagtgatgaagcagtctatggaaaaggtgcgaaacaaacggtgccagatgaaaacgttttagccgaacatctggtgcgtaaagctgctgcaattcgcgccctggagaaagaactgatccacgatttgcaggaaaatgaacaatacgccctgtttactgaccttgaattacctctgtcctcgattctggcagagatggaatttaccggtgtgaaagtagatgttgaacgcctgaaagaaatgggcgaggagctcacagaacaactgcgccaagtggagcaggaaatctataagttagctggccaagagttcaacattaacagccctaaacaactgggtgtcattctgtttgaaaaattacagcttcccgtcctgaagaagacgaagaccggctatagtacgagtgctcgcgtgctcgagaaacttgccccgcagcatgaaatcgtcgagaaaattcttcactaccgtcagctcggtaaactgcaatccacatatattgaagggctgctgaaagttgtacatcgcgacacccataaagtccacaccatcttcaaccaggccctgactcaaaccgggcgcctgtcaagcaccgaacctaatctccagaacatcccaattcgtctggaagaaggccgcaaaattcgccaagcatttgtgccatcggaacctgactgggttatctttagcgcagattactcacagattgagctccgtgttctcgcacacattgcaaacgatgaaaatctgatcgatgcttttcgtcatgaccttgacatccatacgaagacagccatggatattttccatgtaacagcagatgaagttacccccaatatgcgtcgccaagcaaaagccgtgaacttcggtattgtctatgggatctctgattacggtctgagtcagaaccttaatatccctcgcaaagaagccgccgaatttattcgtcgttatttcgaaagctttcccggcgttaaacagtacatggagaatattgtacaggaagccaaacagaaaggatacgtcaccacccttttacaccgccgccgctatctgccagacatccactctcgtaatttcaacttacgttcattcgcagaacgcacggccatgaacaccccaattcaaggatcagccgccgacatcatcaagaaggcaatgattgatttagctcgtcgtctgaaacgcgagaaacttcaagctcgtatgctgctccaggttcatgacgaactgattcttgaagctcctcgtgaggaagtcgaacgcctggttcagattgtacccgaggtcatggagaacgccatccagttaaccgtcccactgaaagttgattatcactacggtcctacgtggtacgacgctaag

SEQ ID NO: 166 - protein, 604 aa, synthetic construct
  REGION 1..604: note = Variant of DNA polymerase
MHHHHHHGGSGMVAPQTKKEEAVLPNINYTIVEEVTEPILADRSALVVEVLESNYHKAPILGFALANEHGNFFIRTDTALSSPLFTAWLEDESKKKSVFDGKRAIVALKWKGIELRGIEFDLLIASYLLNPSQSTEDVASVAKTKQYMAVQSDEAVYGKGAKQTVPDENVLAEHLVRKAAAIRALEKELIHDLQENEQYALFTDLELPLSSILAEMEFTGVKVDVERLKEMGEELTEQLRQVEQEIYKLAGQEFNINSPKQLGVILFEKLQLPVLKKTKTGYSTSARVLEKLAPQHEIVEKILHYRQLGKLQSTYIEGLLKVVHRDTHKVHTIFNQALTQTGRLSSTEPNLQNIPIRLEEGRKIRQAFVPSEPDWVIFSADYSQIELRVLAHIANDENLIDAFRHDLDIHTKTAMDIFHVTADEVTPNMRRQAKAVNFGIVYGISDYGLSQNLNIPRKEAAEFIRRYFESFPGVKQYMENIVQEAKQKGYVTTLLHRRRYLPDIHSRNFNLRSFAERTAMNTPIQGSAADIIKKAMIDLARRLKREKLQARMLLQVHDELILEAPREEVERLVQIVPEVMENAIQLTVPLKVDYHYGPTWYDAK

SEQ ID NO: 167 - DNA, 1812 bp, synthetic construct
  misc_feature 1..1812: note = Variant of DNA polymerase
  source 1..1812: mol_type = other DNA
atgcatcaccatcaccatcacggtggcagcggtatggttgcaccacagaccaaaaaagaagaagccgtactgccgaacatcaattatacaattgtggaggaagtcaccgaaccgattctcgcggatcgttcggcgttagtggttgaggttctggaatccaactaccataaggctccgatcctgggctttgccctggccaatgaacacggtaacttcttcattcgcactgacacggctctttcttctccgctgtttaccgcgtggctggaggatgagagcaagaagaaatcagtattcgacggtaaacgcgcaatcgtggccctgaaatggaaaggcattgaattacgtggcatcgaatttgacttgttgatcgcttcatatctcctgaatccctcgcaaagcacggaagatgtcgcaagcgtggccaagaccaaacagtacatggcagtacagagtgatgaagcagtctatggaaaaggtgcgaaacaaacggtgccagatgaaaacgttttagccgaacatctggtgcgtaaagctgctgcaattcgcgccctggagaaagaactgatccacgatttgcaggaaaatgaacaatacgccctgtttactgaccttgaattacctctgtcctcgattctggcagagatggaatttaccggtgtgaaagtagatgttgaacgcctgaaagaaatgggcgaggagctcacagaacaactgcgccaagtggagcaggaaatctataagttagctggccaacgcttcaacattaacagccctaaacaactgggtgtcattctgtttgaaaaattacagcttcccgtcctgaagaagacgaagaccggctatagtacgagtgctgatgtgctcgagaaacttgccccgcagcatgaaatcgtcgagaaaattcttcactaccgtcagctcggtaaactgcaatccacatatattgaagggctgctgaaagttgtacatcgcgacacccataaagtccacaccatcttcaaccaggccctgactcaaaccgggcgcctgtcaagcaccgaacctaatctccagaacatcccaattcgtctggaagaaggccgcaaaattcgccaagcatttgtgccatcggaacctgactgggttatctttagcgcagattactcacagattgagctccgtgttctcgcacacattgcaaacgatgaaaatctgatcgatgcttttcgtcatgaccttgacatccatacgaagacagccatggatattttccatgtaacagcagatgaagttacccccaatatgcgtcgccaagcaaaagccgtgaacttcggtattgtctatgggatctctgattacggtctgagtcagaaccttaatatcccacgcaaagaagccgccgaatttattcgtcgttatttcgaaagctttcccggcgttaaacagtacatggagaatattgtacaggaagccaaacagaaaggatacgtcaccacccttttacaccgccgccgctatctgccagacatccactctcgtaatttcaacttacgttcattcgcagaacgcacggccatgaacaccccaattcaaggatcagccgccgacatcatcaagaaggcaatgattgatttagctgaccgtctgaaacgcgagaaacttcaagctcgtatgctgctccaggttcatgacgaactgattcttgaagctcctcgtgaggaagtcgaacgcctgcagcagattgtacccgaggtcatggagaacgccgtccagttaaccgtcccactgaaagttgattatcactacggtcctacgtggtacgacgctaag

SEQ ID NO: 168 - protein, 604 aa, synthetic construct
  REGION 1..604: note = Variant of DNA polymerase
MHHHHHHGGSGMVAPQTKKEEAVLPNINYTIVEEVTEPILADRSALVVEVLESNYHKAPILGFALANEHGNFFIRTDTALSSPLFTAWLEDESKKKSVFDGKRAIVALKWKGIELRGIEFDLLIASYLLNPSQSTEDVASVAKTKQYMAVQSDEAVYGKGAKQTVPDENVLAEHLVRKAAAIRALEKELIHDLQENEQYALFTDLELPLSSILAEMEFTGVKVDVERLKEMGEELTEQLRQVEQEIYKLAGQRFNINSPKQLGVILFEKLQLPVLKKTKTGYSTSADVLEKLAPQHEIVEKILHYRQLGKLQSTYIEGLLKVVHRDTHKVHTIFNQALTQTGRLSSTEPNLQNIPIRLEEGRKIRQAFVPSEPDWVIFSADYSQIELRVLAHIANDENLIDAFRHDLDIHTKTAMDIFHVTADEVTPNMRRQAKAVNFGIVYGISDYGLSQNLNIPRKEAAEFIRRYFESFPGVKQYMENIVQEAKQKGYVTTLLHRRRYLPDIHSRNFNLRSFAERTAMNTPIQGSAADIIKKAMIDLADRLKREKLQARMLLQVHDELILEAPREEVERLQQIVPEVMENAVQLTVPLKVDYHYGPTWYDAK

SEQ ID NO: 169 - DNA, 1812 bp, synthetic construct
  misc_feature 1..1812: note = Variant of DNA polymerase
  source 1..1812: mol_type = other DNA
atgcatcaccatcaccatcacggtggcagcggtatggttgcaccacagaccaaaaaagaagaggccgtactgccgaacatcaattatacaattgtggaggaagtcaccgaaccgattctcgcggatcgttcggcgttagtggttgaggttctggaatccaactaccataaggctccgatcctgggctttgccctggccaatgaacacggtaacttcttcattcgcactgacacggctctttcttctccgcagtttaccgcgtggctggaggatgagagcaagaagaaatcagtattcgacggtaaacgcgcaatcgtggccctgaaatggaaaggcattgaattacgtggcatcgaatttgacttgttgatcgcttcatatctcctgaatccctcgcaaagcacggaagatgtcgcaagcgtggccaagaccaaacagtacatggcagtacagagcgatgaagcagtctatggaaaaggtgcgaaacaaacggtgccagatgaaaacgttttagccgaacatctggtgcgtaaagctgctgcaattcgcgccctggagaaagaactgatccacgatttgcaggaaaatgaacaatacgccctgtttactgaccttgaattacctctgtcctcgattctggcagagatggaatttaccggtgtgaaagtagatgttgaacgcctgaaagaaatgggcgaggagctcacagaacaactgcgccaagtggagcaggaaatctataagttagctggccaacgcttcaacattaacagccctaaacaactgggtgtcattctgtttgaaaaattacagcttcccgtcctgaagaagacgaagaccggctatagtacgagtgctcgcgtgctcgagaaacttgccccgcagcatgaaatcgtcgagaaaattcttcattaccgtcagctcggtaaactgcaatccacatatattgaagggctgctgaaagttgtacatcgcgacacccataaagtccacaccatcttcaaccaggccctgactcaaaccgggcgcctgtcaagcaccgaacctaatctccagaacatcccaattcgtctggaagaaggccgcaaaattcgccaagcatttgtgccatcggaacctgactgggttatctttagcgcagattactcacagattgagctccgtgttctcgcacacattgcaaacgatgaaaatctgatcgatgcttttcgtcatgaccttgacatccatacgaagacagccatggatattttccatgtaacagcagatgaagttacccccaatatgcgtcgccaagcaaaagccgtgaacttcggtattgtctatgggatctctgattacggtctgagtcagaaccttaatatcactcgcaaagaagccgccgaatttattcgtcgttatttcgaaagctttcccggcgttaaacagtacatggagaatattgtacaggaagccaaacagaaaggatacgtcaccacccttttacaccgccgccgctatctgccagacatcacctctcgtaatttcaacttacgttcattcgcagaacgcacggccatgaacaccccaattcaaggatcagccgccgacatcatcaagaaggcaatgattgatttagctgatcgtctgaaacgcgagaaacttcaagctcgtatgctgctccaggttcatgacgaactgattcttgaagctcctcgtgaggaagtcgaacgcctggttcagattgtacccgaggtcatggagaacgccatccagttaaccgtcccactgaaagttgattatcactacggtcctacgtggtacgacgctaag

SEQ ID NO: 170 - protein, 604 aa, synthetic construct
  REGION 1..604: note = Variant of DNA polymerase
MHHHHHHGGSGMVAPQTKKEEAVLPNINYTIVEEVTEPILADRSALVVEVLESNYHKAPILGFALANEHGNFFIRTDTALSSPQFTAWLEDESKKKSVFDGKRAIVALKWKGIELRGIEFDLLIASYLLNPSQSTEDVASVAKTKQYMAVQSDEAVYGKGAKQTVPDENVLAEHLVRKAAAIRALEKELIHDLQENEQYALFTDLELPLSSILAEMEFTGVKVDVERLKEMGEELTEQLRQVEQEIYKLAGQRFNINSPKQLGVILFEKLQLPVLKKTKTGYSTSARVLEKLAPQHEIVEKILHYRQLGKLQSTYIEGLLKVVHRDTHKVHTIFNQALTQTGRLSSTEPNLQNIPIRLEEGRKIRQAFVPSEPDWVIFSADYSQIELRVLAHIANDENLIDAFRHDLDIHTKTAMDIFHVTADEVTPNMRRQAKAVNFGIVYGISDYGLSQNLNITRKEAAEFIRRYFESFPGVKQYMENIVQEAKQKGYVTTLLHRRRYLPDITSRNFNLRSFAERTAMNTPIQGSAADIIKKAMIDLADRLKREKLQARMLLQVHDELILEAPREEVERLVQIVPEVMENAIQLTVPLKVDYHYGPTWYDAK

SEQ ID NO: 171 - DNA, 1812 bp, synthetic construct
  misc_feature 1..1812: note = Variant of DNA polymerase
  source 1..1812: mol_type = other DNA
atgcatcaccatcaccatcacggtggcagcggtatggttgcaccacagaccaaaaaagaagaagccgtactgccgaacatcaattatacaattgtggaggaagtcaccgaaccgattctcgcggatcgttcggcgttagtggttgaggttctggggtccaactaccataaggctccgatcctgggctttgccctggccaatgaacacggtaacttcttcattcgcactgacacggctctttcttctccgctgtttaccgcgtggctggaggatgagagcaagaagaaatcagtattcgacggtaaacgcgcaatcgtggccctgaaatggaaaggcattgaattacgtggcatcgaatttgacttgttgattgcttcatatctcctgaatccctcgcaaagcacggaagatgtcgcaagcgtggccaagaccaaacagtacatggcagtacagagtgatgaggcagtctatggaaaaggtgcgaaacaaacggtgccagatgaaaacgttttagccgaacatctggtgcgtaaagctgctgcaattcgcgccctggagaaagaactgatccacgatttgcaggaaaatgaacaatacgccctgtttactgaccttgaattacctctgtcctcgatcctggcagagatggaatttaccggtgtgaaagtagatgttgaacgcctgaaagaaatgggcgaggagctcacagaacaactgcgccaagtggagcaggaaatctataagttagctggccaagaattcaacattaacagccctaaacaactgggtgtcattctgtttgaaaaattacagcttcccgtcctgaagaagacgaagaccggctatagtacgagtgctgatgtgctcgagaaacttgcccctcagcatgaaatcgtcgagaaaattcttcactaccgtcagctcggtaaactgcaatccacatatattgaagggctgctgaaagttgtacatcgcgacacccataaagtccacaccatcttcaaccaggccctgactcaaaccgggcgcctgtcaagcaccgaacctaatctccagaacatcccaattcgtctggaagaaggccgcaaaattcgccaagcatttgtgccatcgaaacctgactgggttatctttagcgcagattactcacagattgagctccgtgttctcgcacacattgcaaacgatgaaaatctgatcgatgcttttcgtcatgaccttgacatccatacgaagacagccatggatattttccatgtaacagcagatgaagttacccccaatatgcgtcgccaagcaaaagccgtgaacttcggtattgtctatgggatctctgattacggtctgagtcagaatcttaatatcccacgcaaagaagccgccgaatttattcgtcgttatttcgaaagctttcccggcgttaaacagtacatggagaatattgtacaggaagccaaacagaaaggatacgtcaccacccttttacaccgccgccgctatctgccagacatcacctctcgtaatcgtaacttacgttcattcgcagaacgcacggccatgaacaccccaattcaaggatcagccgccgacatcatcaagaaggcaatgattgatttagctgatcgtctgaaacgcgagaaacttcaagctcgtatgctgctccaggttcatgacgaactgattcttgaagctcctcgtgaggaagtcgaacgcctgcagcagattgtacccgaggtcatggagaacgccatccagttaaccgtcccactgaaagttagctatcactacggtcctacgtggtacgacgctaag

SEQ ID NO: 172 - protein, 604 aa, synthetic construct
  REGION 1..604: note = Variant of DNA polymerase
MHHHHHHGGSGMVAPQTKKEEAVLPNINYTIVEEVTEPILADRSALVVEVLGSNYHKAPILGFALANEHGNFFIRTDTALSSPLFTAWLEDESKKKSVFDGKRAIVALKWKGIELRGIEFDLLIASYLLNPSQSTEDVASVAKTKQYMAVQSDEAVYGKGAKQTVPDENVLAEHLVRKAAAIRALEKELIHDLQENEQYALFTDLELPLSSILAEMEFTGVKVDVERLKEMGEELTEQLRQVEQEIYKLAGQEFNINSPKQLGVILFEKLQLPVLKKTKTGYSTSADVLEKLAPQHEIVEKILHYRQLGKLQSTYIEGLLKVVHRDTHKVHTIFNQALTQTGRLSSTEPNLQNIPIRLEEGRKIRQAFVPSKPDWVIFSADYSQIELRVLAHIANDENLIDAFRHDLDIHTKTAMDIFHVTADEVTPNMRRQAKAVNFGIVYGISDYGLSQNLNIPRKEAAEFIRRYFESFPGVKQYMENIVQEAKQKGYVTTLLHRRRYLPDITSRNRNLRSFAERTAMNTPIQGSAADIIKKAMIDLADRLKREKLQARMLLQVHDELILEAPREEVERLQQIVPEVMENAIQLTVPLKVSYHYGPTWYDAK

SEQ ID NO: 173 - DNA, 1812 bp, synthetic construct
  misc_feature 1..1812: note = Variant of DNA polymerase
  source 1..1812: mol_type = other DNA
atgcatcaccatcaccatcacggtggcagcggtatggttgcaccacagaccaaaaaagaagaagccgtactgccgaacatcaattatacaattgtggaggaagtcaccgaaccgattctcgcggatcgttcggcgttagtggttgaggttctggaatccaactaccataaggctccgatcctgggctttgccctggccaatgaacacggtaacttcttcattcgcactgacacggctctttcttctccgctgtttaccgcgtggctggaggatgagagcaagaagaaatcagtattcgacggtaaacgcgcaatcgtggccctgaaatggaaaggcattgaattacgtggcatcgaatttgacttgttgatcgcttcatatctcctgaatccctcgcaaagcacggaagatgtcgcaagcgtggccaagaccaaacagtacatggcagtacagagtgatgaagcagtctatggaaaaggtgcgaaacaaacggtgccagatgaaaacgttttagccgaacatctggtgcgtaaagctgctgcaattcgcgccctggagaaagaactgatccacgatttgcaggaaaatgaacaatacgccctgtttactgaccttgaattacctctgtcctcgattctggcagagatggaatttaccggtgtgaaagtagatgttgaacgcctgaaagaaatgggcgaggagctcacagaacaactgcgccaagtggagcaggaaatctataagttagctggccaagaattcaacattaacagccctaaacaactgggtgtcattctgtttgaaaaattacagcttcccgtcctgaagaagacgaagaccggctatagtacgagtgctgatgtgctcgagaaacttgcccctcagcatgaaatcgtcgagaaaattcttcactaccgtcagctcggtaaactgcaatccacatatattgaagggctgctgaaagttgtacatcgcgacacccataaagtccacaccatcttcaaccaggccctgactcaaaccgggcgcctgtcaagcaccgaacctaatctccagaacatcccaattcgtctggaagaaggccgcaaaattcgccaagcatttgtgccatcggaacctgactgggttatctttagcgcagattactcacagattgagctccgtgttctcgcacacattgcaaacgatgaaaatctgatcgatgcttttcgtcatgaccttgacatccatacgaagacagccatggatattttccatgtaacagcagatgaagttacccccaatatgcgtcgccaagcaaaagccgtgaacttcggtattgtctatgggatctctgattacggtctgagtcagaaccttaatatcccacgcaaagaagccgccgaatttattcgtcgttatttcgaaagctttcccggcgttaaacagtacatggagaatattgtacaggaagccaaacagaaaggatacgtcaccacccttttacaccgccgccgctatctgccagacatcacctctcgtaatcgtaacttacgttcattcgcagaacgcacggccatgaacaccccaattcaaggatcagccgccgacatcatcaagaaggcaatgattgatttagctgatcgtctgaaacgcgagaaacttcaagctcgtatgctgctccaggttcatgacgaactgattcttgaagctcctcgtgaggaagtcgaacgcctgcagcagattgtacccgaggtcatggagaacgccatccagttaaccgtcccactgaaagttagctatcactacggtcctacgtggtacgacgctaag

SEQ ID NO: 174 - protein, 604 aa, synthetic construct
  REGION 1..604: note = Variant of DNA polymerase
MHHHHHHGGSGMVAPQTKKEEAVLPNINYTIVEEVTEPILADRSALVVEVLESNYHKAPILGFALANEHGNFFIRTDTALSSPLFTAWLEDESKKKSVFDGKRAIVALKWKGIELRGIEFDLLIASYLLNPSQSTEDVASVAKTKQYMAVQSDEAVYGKGAKQTVPDENVLAEHLVRKAAAIRALEKELIHDLQENEQYALFTDLELPLSSILAEMEFTGVKVDVERLKEMGEELTEQLRQVEQEIYKLAGQEFNINSPKQLGVILFEKLQLPVLKKTKTGYSTSADVLEKLAPQHEIVEKILHYRQLGKLQSTYIEGLLKVVHRDTHKVHTIFNQALTQTGRLSSTEPNLQNIPIRLEEGRKIRQAFVPSEPDWVIFSADYSQIELRVLAHIANDENLIDAFRHDLDIHTKTAMDIFHVTADEVTPNMRRQAKAVNFGIVYGISDYGLSQNLNIPRKEAAEFIRRYFESFPGVKQYMENIVQEAKQKGYVTTLLHRRRYLPDITSRNRNLRSFAERTAMNTPIQGSAADIIKKAMIDLADRLKREKLQARMLLQVHDELILEAPREEVERLQQIVPEVMENAIQLTVPLKVSYHYGPTWYDAK

SEQ ID NO: 175 - DNA, 1812 bp, synthetic construct
  misc_feature 1..1812: note = Variant of DNA polymerase
  source 1..1812: mol_type = other DNA
atgcatcaccatcaccatcacggtggcagcggtatggttgcaccacagaccaaaaaagaagaagccgtactgccgaacatcaattatacaattgtggaggaagtcaccgaaccgattctcgcggatcgttcggcgttagtggttgaggttctggagtccaactaccataaggctccgatcctgggctttgccctggccaatgaacacggtaacttcttcattcgcactgacacggctctttcttctccgctgtttaccgcgtggctggaggatgagagcaagaagaaatcagtattcgacggtaaacgcgcaatcgtggccctgaaatggaaaggcattgaattacgtggcatcgaatttgacttgttgattgcttcatatctcctgaatccctcgcaaagcacggaagatgtcgcaagcgtggccaagaccaaacagtacatggcagtacagagtgattgggcagtctatggaaaaggtgcgaaacaaacggtgccagatgaaaacgttttagccgaacatctggtgcgtaaagctgctgcaattcgcgccctggagaaagaactgatccacgatttgcaggaaaatgaacaatacgccctgtttactgaccttgaattacctctgtcctcggtcctggcagagatggaatttaccggtgtgaaagtagatgttgaacgcctgaaagaaatgggcgaggagctcacagaacaactgcgccaagtggagcaggaaatctataagttagctggccaagaattcaacattaacagccctaaacaactgggtgtcattctgtttgaaaaattacagcttcccgtcctgaagaagacgaagaccggctatagtacgagtgctgatgtgctcgagaaacttgccccgcagcatgaaatcgtccgcaaaattcttcactaccgtcagctcggtaaactgcaatccacatatattgaagggctgctgaaagttgtacatcgcgacacccataaagtccacaccatcttcaaccaggccctgactcaaaccgggcgcctgtcaagcaccgaacctaatctccagaacatcccaattcgtctggaagaaggccgcaaaattcgccaagcatttgtgccatcgaaacctgactgggttatctttagcgcagattactcacagattgagctccgtgttctcgcacacattgcaaacgatgaaaatctgatcgatgcttttcgtcatgaccttgacatccatacgaagacagccatggatattttccatgtaacagcagatgaagttacccccaatatgcgtcgccaagcaaaagccgtgaacttcggtattgtctatgggatctctgattacggtctgagtcagaatcttaatatcccacgcaaagaagccgccgaatttattcgtcgttatttcgaaagctttcccggcgttaaacagtacatggagaatattgtacaagaagccaaacagaaaggatacgtcaccacccttttacaccgccgccgctatctgccagacatcacctctcgtaatcgtaacttacgttcattcgcagaacgcacggccatgaacaccccaattcaaggatcagccgccgacatcatcaagaaggcaatgattgatttagctgatcgtctgaaacgcgagaaacttcaagctcgtatgctgctccaggttcatgacgaactgattcttgaagctcctcgtgaggaagtcgaacgcctgcagcagattgtacccgaggtcatggagaacgccatccagttaaccgtcccactgaaagttgattatcactacggtcctacgtggtacgacgctaag

SEQ ID NO: 176 - protein, 604 aa, synthetic construct
  REGION 1..604: note = Variant of DNA polymerase
MHHHHHHGGSGMVAPQTKKEEAVLPNINYTIVEEVTEPILADRSALVVEVLESNYHKAPILGFALANEHGNFFIRTDTALSSPLFTAWLEDESKKKSVFDGKRAIVALKWKGIELRGIEFDLLIASYLLNPSQSTEDVASVAKTKQYMAVQSDWAVYGKGAKQTVPDENVLAEHLVRKAAAIRALEKELIHDLQENEQYALFTDLELPLSSVLAEMEFTGVKVDVERLKEMGEELTEQLRQVEQEIYKLAGQEFNINSPKQLGVILFEKLQLPVLKKTKTGYSTSADVLEKLAPQHEIVRKILHYRQLGKLQSTYIEGLLKVVHRDTHKVHTIFNQALTQTGRLSSTEPNLQNIPIRLEEGRKIRQAFVPSKPDWVIFSADYSQIELRVLAHIANDENLIDAFRHDLDIHTKTAMDIFHVTADEVTPNMRRQAKAVNFGIVYGISDYGLSQNLNIPRKEAAEFIRRYFESFPGVKQYMENIVQEAKQKGYVTTLLHRRRYLPDITSRNRNLRSFAERTAMNTPIQGSAADIIKKAMIDLADRLKREKLQARMLLQVHDELILEAPREEVERLQQIVPEVMENAIQLTVPLKVDYHYGPTWYDAK

SEQ ID NO: 177 - DNA, 1812 bp, synthetic construct
  misc_feature 1..1812: note = Variant of DNA polymerase
  source 1..1812: mol_type = other DNA
atgcatcaccatcaccatcacggtggcagcggtatggttgcaccacagaccaaaaaagaagaagccgtactgccgaacatcaattatacaattgtggaggaagtcaccgaaccgattctcgcggatcgttcggcgttagtggttgaggttctggggtccaactaccataaggctccgatcctgggctttgccctggccaatgaacacggtaacttcttcattcgcactgacacggctctttcttctccgctgtttaccgcgtggctggaggatgagagcaagaagaaatcagtattcgacggtaaacgcgcaatcgtggccctgaaatggaaaggcattgaattacgtggcatcgaatttgacttgttgatcgcttcatatctcctgaatccctcgcaaagcacggaagatgtcgcaagcgtggccaagaccaaacagtacatggcagtacagagtgattgggcagtctatggaaaaggtgcgaaacaaacggtgccagatgaaaacgttttagccgaacatctggtgcgtaaagctgctgcaattcgcgccctggagaaagaactgatccacgatttgcaggaaaatgaacaatacgccctgtttactgaccttgaattacctctgtcctcgattctggcagagatggaatttaccggtgtgaaagtagatgttgaacgcctgaaagaaatgggcgaggagctcacagaacaactgcgccaagtggagcaggaaatctataagttagctggccaagaattcaacattaacagccctaaacaactgggtgtcattctgtttgaaaaattacagcttcccgtcctgaagaagacgaagaccggctatagtacgagtgctgatgtgctcgagaaacttgcccgtcagcatgaaatcgtcgagaaaattcttcactaccgtcagctcggtaaactgcaatccacatatattgaagggctgctgaaagttgtacatcgcgacacccataaagtccacaccatcttcaaccaggccctgactcaaaccgggcgcctgtcaagcaccgaacctaatctccagaacatcccaattcgtctggaagaaggccgcaaaattcgccaagcatttgtgccatcggaacctgactgggttatctttagcgcagattactcacagattgagctccgtgttctcgcacacattgcaaacgatgaaaatctgatcgatgcttttcgtcatgaccttgacatccatacgaagacagccatggatattttccatgtaacagcagatgaagttacccccaatatgcgtcgccaagcaaaagccgtgaacttcggtattgtctatgggatctctgattacggtctgagtcagaatcttaatatcccacgcaaagaagccgccgaatttattcgtcgttatttcgaaagctttcccggcgttaaacagtacatggagaatattgtacaagaagccaaacagaaaggatacgtcaccacccttttacaccgccgccgctatctgccagacatcacctctcgtaatcgtaacttacgttcattcgcagaacgcacggccatgaacaccccaattcaaggatcagccgccgacatcatcaagaaggcaatgattgatttagctgatcgtctgaaacgcgagaaacttcaagctcgtatgctgctccaggttcatgacgaactgattcttgaagctcctcgtgaggaagtcgaacgcctgcagcagattgtacccgaggtcatggagaacgccatccagttaaccgtcccactgaaagttagctatcactacggtcctacgtggtacgacgctaag

SEQ ID NO: 178 - protein, 604 aa, synthetic construct
  REGION 1..604: note = Variant of DNA polymerase
MHHHHHHGGSGMVAPQTKKEEAVLPNINYTIVEEVTEPILADRSALVVEVLGSNYHKAPILGFALANEHGNFFIRTDTALSSPLFTAWLEDESKKKSVFDGKRAIVALKWKGIELRGIEFDLLIASYLLNPSQSTEDVASVAKTKQYMAVQSDWAVYGKGAKQTVPDENVLAEHLVRKAAAIRALEKELIHDLQENEQYALFTDLELPLSSILAEMEFTGVKVDVERLKEMGEELTEQLRQVEQEIYKLAGQEFNINSPKQLGVILFEKLQLPVLKKTKTGYSTSADVLEKLARQHEIVEKILHYRQLGKLQSTYIEGLLKVVHRDTHKVHTIFNQALTQTGRLSSTEPNLQNIPIRLEEGRKIRQAFVPSEPDWVIFSADYSQIELRVLAHIANDENLIDAFRHDLDIHTKTAMDIFHVTADEVTPNMRRQAKAVNFGIVYGISDYGLSQNLNIPRKEAAEFIRRYFESFPGVKQYMENIVQEAKQKGYVTTLLHRRRYLPDITSRNRNLRSFAERTAMNTPIQGSAADIIKKAMIDLADRLKREKLQARMLLQVHDELILEAPREEVERLQQIVPEVMENAIQLTVPLKVSYHYGPTWYDAK

SEQ ID NO: 179 - DNA, 1812 bp, synthetic construct
  misc_feature 1..1812: note = Variant of DNA polymerase
  source 1..1812: mol_type = other DNA
atgcatcaccatcaccatcacggtggcagcggtatggttgcaccacagaccaaaaaagaagaggccgtactgccgaacatcaattatacaattgtggaggaagtcaccgaaccgattctcgcggatcgttcggcgttagtggttgaggttctggaatccaactaccataaggctccgatcctgggctttgccctggccaatgaacacggtaacttcttcattcgcactgacacggctctttcttctccgctgtttaccgcgtggctggaggatgagagcaagaagaaatcagtattcgacggtaaacgcgcaatcgtggccctgaaatggaaaggcattgaattacgtggcatcgaatttgacttgttgatcgcttcatatctcctgaatccctcgcaaagcacggaagatgtcgcaagcgtggccaagaccaaacagtacatggcagtacagcgcgatgaagcagtctatggaaaaggtgcgaaacaaacggtgccagatgaaaacgttttagccgaacatctggtgcgtaaagctgctgcaattcgcgccctggagaaagaactgatccacgatttgcaggaaaatgaacaatacgccctgtttactgaccttgaattacctctgtcctcgattctggcagagatggaatttaccggtgtgaaagtagatgttgaacgcctgaaagaaatgggcgaggagctcacagaacaactgcgccaagtggagcaggaaatctataagttagctggccaagagttcaacattaacagccctaaacaactgggtgtcattctgtttgaaaaattacagcttcccgtcctgaagaagacgaagaccggctatagtacgagtgctgatgtgctcgagaaacttgccccgaaacatgaaatcgtcgagaaaattcttcactaccgtcagctcggtaaactgcaatccacatatattgaagggctgctgaaagttgtacatcgcgacacccataaagtccacaccatcttcaaccaggccctgactcaaaccgggcgcctgtcaagcaccgaacctaatctccagaacatcccaattcgtctggaagaaggccgcaaaattcgccaagcatttgtgccatcggaacctgactgggttatctttagcgcagattactcacagattgagctccgtgttctcgcacacattgcaaacgatgaaaatctgatcgatgcttttcgtcatgaccttgacatccatacgaagacagccatggatattttccatgtaacagcagatgaagttacccccaatatgcgtcgccaagcaaaagccgtgaacttcggtattgtctatgggatctctgattacggtctgagtcagaaccttaacatcccacgcaaagaagccgccgaatttattcgtcgttatttcgaaagctttcccggcgttaaacagtacatggagaatattgtacaggaagccaaacagaaaggatacgtcaccacccttttacaccgccgccgctatctgccagacatccactctcgtaatttcaacttacgttcattcgcagaacgcacggccatgaacaccccaattcaaggatcagccgccgacatcatcaagaaggcaatgattgatttagctgatcgtctgaaaaaagagaaacttcaagctcgtatgctgctccaggttcatgacgaactgattcttgaagctcctcgtgaggaagtcgaacgcctggttcagattgtacccgaggtcatggagaacgccatccagttaaccgtcccactgaaagttgattatcactacggtcctacgtggtacgacgctaag

SEQ ID NO: 180 - protein, 604 aa, synthetic construct
  REGION 1..604: note = Variant of DNA polymerase
MHHHHHHGGSGMVAPQTKKEEAVLPNINYTIVEEVTEPILADRSALVVEVLESNYHKAPILGFALANEHGNFFIRTDTALSSPLFTAWLEDESKKKSVFDGKRAIVALKWKGIELRGIEFDLLIASYLLNPSQSTEDVASVAKTKQYMAVQRDEAVYGKGAKQTVPDENVLAEHLVRKAAAIRALEKELIHDLQENEQYALFTDLELPLSSILAEMEFTGVKVDVERLKEMGEELTEQLRQVEQEIYKLAGQEFNINSPKQLGVILFEKLQLPVLKKTKTGYSTSADVLEKLAPKHEIVEKILHYRQLGKLQSTYIEGLLKVVHRDTHKVHTIFNQALTQTGRLSSTEPNLQNIPIRLEEGRKIRQAFVPSEPDWVIFSADYSQIELRVLAHIANDENLIDAFRHDLDIHTKTAMDIFHVTADEVTPNMRRQAKAVNFGIVYGISDYGLSQNLNIPRKEAAEFIRRYFESFPGVKQYMENIVQEAKQKGYVTTLLHRRRYLPDIHSRNFNLRSFAERTAMNTPIQGSAADIIKKAMIDLADRLKKEKLQARMLLQVHDELILEAPREEVERLVQIVPEVMENAIQLTVPLKVDYHYGPTWYDAK

SEQ ID NO: 181 - DNA, 1812 bp, synthetic construct
  misc_feature 1..1812: note = Variant of DNA polymerase
  source 1..1812: mol_type = other DNA
atgcatcaccatcaccatcacggtggcagcggtatggttgcaccacagaccaaaaaagaagaggccgtactgccgaacatcaattatacaattgtggaggaagtcaccgaaccgattctcgcggatcgttcggcgttagtggttgaggttctggaatccaactaccataaggctccgatcctgggctttgccctggccaatgaacacggtaacttcttcattcgcactgacacggctctttcttctccgctgtttaccgcgtggctggaggatgagagcaagaagaaatcagtattcgacggtaaacgcgcaatcgtggccctgaaatggaaaggcattgaattacgtggcatcgaatttgacttgttgatcgcttcatatctcctgaatccctcgcaaagcacggaagatgtcgcaagcgtggccaagaccaaacagtacatggcagtacagagtgatgaagcagtctatggaaaaggtgcgaaacaaacggtgccagatgaaaacgttttagccgaacatctggtgcgtaaagctgctgcaattcgcgccctggagaaagaactgatccacgatttgcaggaaaatgaacaatacgccctgtttactgaccttgaattacctctgtcctcgattctggcagagatggaatttaccggtgtgaaagtagatgttgaacgcctgaaagaaatgggcgaggagctcacagaacaactgcgccaagtggagcaggaaatctataagttagctggccaacgcttcaacattaacagccctaaacaactgggtgtcattctgtttgaaaaattacagcttcccgtcctgaagaagacgaagaccggctatagtacgagtgctgatgtgctcgagaaacttgccccgcagcatgaaatcgtcgagaaaattcttcactaccgtcagctcggtaaactgcaatccacatatattgaagggctgctgaaagttgtacatcgcgacacccataaagtccacaccatcttcaaccaggccctgactcaaaccgggcgcctgtcaagcaccgaacctaatctccagaacatcccaattcgtctggaagaaggccgcaaaattcgccaagcatttgtgccatcggaacctgactgggttatctttagcgcagattactcacagattgagctccgtgttctcgcacacattgcaaacgatgaaaatctgatcgatgcttttcgtcatgaccttgacatccatacgaagacagccatggatattttccatgtaacagcagatgaagttacccccaatatgcgtcgccaagcaaaagccgtgaacttcggtattgtctatgggatctctgattacggtctgagtcagaaccttaatatcccacgcaaagaagccgccgaatttattcgtcgttatttcgaaagctttcccggcgttaaacagtacatggagaatattgtacaggaagccaaacagaaaggatacgtcaccacccttttacaccgccgccgctatctgccagacatcacctctcgtaatttcaacttacgttcattcgcagaacgcacggccatgaacaccccaattcaaggatcagccgccgacatcatcaagaaggcaatgattgatttagctcgtcgtctgaaacgcgagaaacttcaagctcgtatgctgctccaggttcatgacgaactgattcttgaagctcctcgtgaggaagtcgaacgcctgcagcagattgtacccgaggtcatggagaacgccgtccagttaaccgtcccactgaaagttgattatcactacggtcctacgtggtacgacgctaag

SEQ ID NO: 182 - protein, 604 aa, synthetic construct
  REGION 1..604: note = Variant of DNA polymerase
MHHHHHHGGSGMVAPQTKKEEAVLPNINYTIVEEVTEPILADRSALVVEVLESNYHKAPILGFALANEHGNFFIRTDTALSSPLFTAWLEDESKKKSVFDGKRAIVALKWKGIELRGIEFDLLIASYLLNPSQSTEDVASVAKTKQYMAVQSDEAVYGKGAKQTVPDENVLAEHLVRKAAAIRALEKELIHDLQENEQYALFTDLELPLSSILAEMEFTGVKVDVERLKEMGEELTEQLRQVEQEIYKLAGQRFNINSPKQLGVILFEKLQLPVLKKTKTGYSTSADVLEKLAPQHEIVEKILHYRQLGKLQSTYIEGLLKVVHRDTHKVHTIFNQALTQTGRLSSTEPNLQNIPIRLEEGRKIRQAFVPSEPDWVIFSADYSQIELRVLAHIANDENLIDAFRHDLDIHTKTAMDIFHVTADEVTPNMRRQAKAVNFGIVYGISDYGLSQNLNIPRKEAAEFIRRYFESFPGVKQYMENIVQEAKQKGYVTTLLHRRRYLPDITSRNFNLRSFAERTAMNTPIQGSAADIIKKAMIDLARRLKREKLQARMLLQVHDELILEAPREEVERLQQIVPEVMENAVQLTVPLKVDYHYGPTWYDAK

SEQ ID NO: 183 - DNA, 1812 bp, synthetic construct
  misc_feature 1..1812: note = Variant of DNA polymerase
  source 1..1812: mol_type = other DNA
atgcatcaccatcaccatcacggtggcagcggtatggttgcaccacagaccaaaaaagaagaggccgtactgccgaacatcaattatacaattgtggaggaagtcaccgaaccgattctcgcggatcgttcggcgttagtggttgaggttctggaatccaactaccataaggctccgatcctgggctttgccctggccaatgaacacggtaacttcttcattcgcactgacacggctctttcttctccgctgtttaccgcgtggctggaggatgagagcaagaagaaatcagtattcgacggtaaacgcgcaatcgtggccctgaaatggaaaggcattgaattacgtggcatcgaatttgacttgttgatcgcttcatatctcctgaatccctcgcaaagcacggaagatgtcgcaagcgtggccaagaccaaacagtacatggcagtacagagcgatgaagcagtctatggaaaaggtgcgaaacaaacggtgccagatgaaaacgttttagccgaacatctggtgcgtaaagctgctgcaattcgcgccctggagaaagaactgatccacgatttgcaggaaaatgaacaatacgccctgtttactgaccttgaattacctctgtcctcgattctggcagagatggaatttaccggtgtgaaagtagatgttgaacgcctgaaagaaatgggcgaggagctcacagaacaactgcgccaagtggagcaggaaatctataagttagctggccaacgcttcaacattaacagccctaaacaactgggtgtcattctgtttgaaaaattacagcttcccgtcctgaagaagacgaagaccggctatagtacgagtgctgatgtgctcgagaaacttgccccgaaacatgaaatcgtcgagaaaattcttctgtaccgtcagctcggtaaactgcaatccacatatattgaagggctgctgaaagttgtacatcgcgacacccataaagtccacaccatcttcaaccaggccctgactcaaaccgggcgcctgtcaagcaccgaacctaatctccagaacatcccaattcgtctggaagaaggccgcaaaattcgccaagcatttgtgccatcggaacctgactgggttatctttagcgcagattactcacagattgagctccgtgttctcgcacacattgcaaacgatgaaaatctgatcgatgcttttcgtcatgaccttgacatccatacgaagacagccatggatattttccatgtaacagcagatgaagttacccccaatatgcgtcgccaagcaaaagccgtgaacttcggtattgtctatgggatctctgattacggtctgagtcagaaccttgggatcccacgcaaagaagccgcccgctttattcgtcgttatttcgaaagctttcccggcgttaaacagtacatggagaatattgtacaggaagccaaacagaaaggatacgtcaccacccttttacaccgccgccgctatctgccagacatcacctctcgtaatttcaacttacgttcattcgcagaacgcacggccatgaacaccccaattcaaggatcagccgccgacatcatcaagaaggcaatgattgatttagctgatcgtctgaaacgcgagaaacttcaagctcgtatgctgctccaggttcatgacgaactgattcttgaagctcctcgtgaggaagtcgaacgcctggttcagattgtacccgaggtcatggagaacgccgtccagttaaccgtcccactgaaagttgattatcactacggtcctacgtggtacgacgctaag

SEQ ID NO: 184 - protein, 604 aa, synthetic construct
  REGION 1..604: note = Variant of DNA polymerase
MHHHHHHGGSGMVAPQTKKEEAVLPNINYTIVEEVTEPILADRSALVVEVLESNYHKAPILGFALANEHGNFFIRTDTALSSPLFTAWLEDESKKKSVFDGKRAIVALKWKGIELRGIEFDLLIASYLLNPSQSTEDVASVAKTKQYMAVQSDEAVYGKGAKQTVPDENVLAEHLVRKAAAIRALEKELIHDLQENEQYALFTDLELPLSSILAEMEFTGVKVDVERLKEMGEELTEQLRQVEQEIYKLAGQRFNINSPKQLGVILFEKLQLPVLKKTKTGYSTSADVLEKLAPKHEIVEKILLYRQLGKLQSTYIEGLLKVVHRDTHKVHTIFNQALTQTGRLSSTEPNLQNIPIRLEEGRKIRQAFVPSEPDWVIFSADYSQIELRVLAHIANDENLIDAFRHDLDIHTKTAMDIFHVTADEVTPNMRRQAKAVNFGIVYGISDYGLSQNLGIPRKEAARFIRRYFESFPGVKQYMENIVQEAKQKGYVTTLLHRRRYLPDITSRNFNLRSFAERTAMNTPIQGSAADIIKKAMIDLADRLKREKLQARMLLQVHDELILEAPREEVERLVQIVPEVMENAVQLTVPLKVDYHYGPTWYDAK

SEQ ID NO: 185 - DNA, 1812 bp, synthetic construct
  misc_feature 1..1812: note = Variant of DNA polymerase
  source 1..1812: mol_type = other DNA
atgcatcaccatcaccatcacggtggcagcggtatggttgcaccacagaccaaaaaagaagaagccgtactgccgaacatcaattatacaattgtggaggaagtcaccgaaccgattctcgcggatcgttcggcgttagtggttgaggttctggaatccaactaccataaggctccgatcctgggctttgccctggccaatgaacacggtaacttcttcattcgcactgacacggctctttcttctccgctgtttaccgcgtggctggaggatgagagcaagaagaaatcagtattcgacggtaaacgcgcaatcgtggccctgaaatggaaaggcattgaattacgtggcatcgaatttgacttgttgatcgcttcatatctcctgaatccctcgcaaagcacggaagatgtcgcaagcgtggccaagaccaaacagtacatggcagtacagagtgatgaagcagtctatggaaaaggtgcgaaacaaacggtgccagatgaaaacgttttagccgaacatctggtgcgtaaagctgctgcaattcgcgccctggagaaagaactgatccacgatttgcaggaaaatgaacaatacgccctgtttactgaccttgaattacctctgtcctcgattctggcagagatggaatttaccggtgtgaaagtagatgttgaacgcctgaaagaaatgggcgaggagctcacagaacaactgcgccaagtggagcaggaaatctataagttagctggccaacgcttcaacattaacagccctaaacaactgggtgtcattctgtttgaaaaattacagcttcccgtcctgaagaagacgaagaccggctatagtacgagtgctgatgtgctcgagaaacttgccccgcaacatgaaatcgtcgagaaaattcttcattaccgtcagctcggtaaactgcaatccacatatattgaagggctgctgaaagttgtacatcgcgacacccataaagtccacaccatcttcaaccaggccctgactcaaaccgggcgcctgtcaagcaccgaacctaatctccagaacatcccaattcgtctggaagaaggccgcaaaattcgccaagcatttgtgccatcggaacctgactgggttatctttagcgcagattactcacagattgagctccgtgttctcgcacacattgcaaacgatgaaaatctgatcgatgcttttcgtcatgaccttgacatccatacgaagacagccatggatattttccatgtaacagcagatgaagttacccccaatatgcgtcgccaagcaaaagccgtgaacttcggtattgtctatgggatctctgattacggtctgagtcagaaccttgggatcccacgcaaagaagccgccgaatttattcgtcgttatttcgaaagctttcccggcgttaaacagtacatggagaatattgtacaggaagccaaacagaaaggatacgtcaccacccttttacaccgccgccgctatctgccagacatccactctcgtaatttcaacttacgttcattcgcagaacgcacggccatgaacaccccaattcaaggatcagccgccgacatcatcaagaaggcaatgattgatttagctgatcgtctgaaacgcgagaaacttcaagctcgtatgctgctccaggttcatgacgaactgattcttgaagctcctcgtgaggaagtcgaacgcctggttcagattgtacccgaggtcatggagaacgccgtccagttaaccgtcccactgaaagttgattatcactacggtcctacgtggtacgacgctaag

SEQ ID NO: 186 - protein, 604 aa, synthetic construct
  REGION 1..604: note = Variant of DNA polymerase
MHHHHHHGGSGMVAPQTKKEEAVLPNINYTIVEEVTEPILADRSALVVEVLESNYHKAPILGFALANEHGNFFIRTDTALSSPLFTAWLEDESKKKSVFDGKRAIVALKWKGIELRGIEFDLLIASYLLNPSQSTEDVASVAKTKQYMAVQSDEAVYGKGAKQTVPDENVLAEHLVRKAAAIRALEKELIHDLQENEQYALFTDLELPLSSILAEMEFTGVKVDVERLKEMGEELTEQLRQVEQEIYKLAGQRFNINSPKQLGVILFEKLQLPVLKKTKTGYSTSADVLEKLAPQHEIVEKILHYRQLGKLQSTYIEGLLKVVHRDTHKVHTIFNQALTQTGRLSSTEPNLQNIPIRLEEGRKIRQAFVPSEPDWVIFSADYSQIELRVLAHIANDENLIDAFRHDLDIHTKTAMDIFHVTADEVTPNMRRQAKAVNFGIVYGISDYGLSQNLGIPRKEAAEFIRRYFESFPGVKQYMENIVQEAKQKGYVTTLLHRRRYLPDIHSRNFNLRSFAERTAMNTPIQGSAADIIKKAMIDLADRLKREKLQARMLLQVHDELILEAPREEVERLVQIVPEVMENAVQLTVPLKVDYHYGPTWYDAK

SEQ ID NO: 187 - DNA, 1812 bp, synthetic construct
  misc_feature 1..1812: note = Variant of DNA polymerase
  source 1..1812: mol_type = other DNA
atgcatcaccatcaccatcacggtggcagcggtatggttgcaccacagaccaaaaaagaagaagccgtactgccgaacatcaattatacaattgtggaggaagtcaccgaaccgattctcgcggatcgttcggcgttagtggttgaggttctggagtccaactaccataaggctccgatcctgggctttgccctggccaatgaacacggtaacttcttcattcgcactgacacggctctttcttctccgctgtttaccgcgtggctggaggatgagagcaagaagaaatcagtattcgacggtaaacgcgcaatcgtggccctgaaatggaaaggcattgaattacgtggcatcgaatttgacttgttgattgcttcatatctcctgaatccctcgcaaagcacggaagatgtcgcaagcgtggccaagaccaaacagtacatggcagtacagagtgattgggcagtctatggaaaaggtgcgaaacaaacggtgccagatgaaaacgttttagccgaacatctggtgcgtaaagctgctgcaattcgcgccctggagaaagaactgatccacgatttgcaggaaaatgaacaatacgccctgtttactgaccttgaattacctctgtcctcggtcctggcagagatggaatttaccggtgtgaaagtagatgttgaacgcctgaaagaaatgggcgaggagctcacagaacaactgcgccaagtggagcaggaaatctataagttagctggccaagaattcaacattaacagccctaaacaactgggtgtcattctgtttgaaaaattacagcttcccgtcctgaagaagacgaagaccggctatagtacgagtgctgatgtgctcgagaaacttgcccctcagcatgaaatcgtccgcaaaattcttcactaccgtcagctcggtaaactgcaatccacatatattgaagggctgctgaaagttgtacatcgcgacacccataaagtccacaccatcttcaaccaggccctgactcaaaccgggcgcctgtcaagcaccgaacctaatctccagaacatcccaattcgtctggaagaaggccgcaaaattcgccaagcatttgtgccatcggaacctgactgggttatctttagcgcagattactcacagattgagctccgtgttctcgcacacattgcaaacgatgaaaatctgatcgatgcttttcgtcatgaccttgacatccatacgaagacagccatggatattttccatgtaacagcagatgaagttacccccaatatgcgtcgccaagcaaaagccgtgaacttcggtattgtctatgggatctctgattacggtctgagtcagaatcttaatatcccacgcaaagaagccgccgaatttattcgtcgttatttcgaaagctttcccggcgttaaacagtacatggagaatattgtacaggaagccaaacagaaaggatacgtcaccacccttttacaccgccgccgctatctgccagacatcacctctcgtaatttcaacttacgttcattcgcagaacgcacggccatgaacaccccaattcaaggatcagccgccgacatcatcaagaaggcaatgattgatttagctgatcgtctgaaacgcgagaaacttcaagctcgtatgctgctccaggttcatgacgaactgattcttgaagctcctcgtgaggaagtcgaacgcctgcagcagattgtacccgaggtcatggagaacgccatccagttaaccgtcccactgaaagttgattatcactacggtcctacgtggtacgacgctaag

SEQ ID NO: 188 - protein, 604 aa, synthetic construct
  REGION 1..604: note = Variant of DNA polymerase
MHHHHHHGGSGMVAPQTKKEEAVLPNINYTIVEEVTEPILADRSALVVEVLESNYHKAPILGFALANEHGNFFIRTDTALSSPLFTAWLEDESKKKSVFDGKRAIVALKWKGIELRGIEFDLLIASYLLNPSQSTEDVASVAKTKQYMAVQSDWAVYGKGAKQTVPDENVLAEHLVRKAAAIRALEKELIHDLQENEQYALFTDLELPLSSVLAEMEFTGVKVDVERLKEMGEELTEQLRQVEQEIYKLAGQEFNINSPKQLGVILFEKLQLPVLKKTKTGYSTSADVLEKLAPQHEIVRKILHYRQLGKLQSTYIEGLLKVVHRDTHKVHTIFNQALTQTGRLSSTEPNLQNIPIRLEEGRKIRQAFVPSEPDWVIFSADYSQIELRVLAHIANDENLIDAFRHDLDIHTKTAMDIFHVTADEVTPNMRRQAKAVNFGIVYGISDYGLSQNLNIPRKEAAEFIRRYFESFPGVKQYMENIVQEAKQKGYVTTLLHRRRYLPDITSRNFNLRSFAERTAMNTPIQGSAADIIKKAMIDLADRLKREKLQARMLLQVHDELILEAPREEVERLQQIVPEVMENAIQLTVPLKVDYHYGPTWYDAK

SEQ ID NO: 189 - DNA, 1812 bp, synthetic construct
  misc_feature 1..1812: note = Variant of DNA polymerase
  source 1..1812: mol_type = other DNA
atgcatcaccatcaccatcacggtggcagcggtatggttgcaccacagaccaaaaaagaagaggccgtactgccgaacatcaattatacaattgtggaggaagtcaccgaaccgattctcgcggatcgttcggcgttagtggttgaggttctggaatccaactaccataaggctccgatcctgggctttgccctggccaatgaacacggtaacttcttcattcgcactgacacggctctttcttctccgctgtttaccgcgtggctggaggatgagagcaagaagaaatcagtattcgacggtaaacgcgcaatcgtggccctgaaatggaaaggcattgaattacgtggcatcgaatttgacttgttgatcgcttcatatctcctgaatccctcgcaaagcacggaagatgtcgcaagcgtggccaagaccaaacagtacatggcagtacagagcgatgaagcagtctatggaaaaggtgcgaaacaaacggtgccagatgaaaacgttttagccgaacatctggtgcgtaaagctgctgcaattcgcgccctggagaaagaactgatccacgatttgcaggaaaatgaacaatacgccctgtttactgaccttgaattacctctgtcctcgattctggcagagatggaatttaccggtgtgaaagtagatgttgaacgcctgaaagaaatgggcgaggagctcacagaacaactgcgccaagtggagcaggaaatctataagttagctggccaagagttcaacattaacagccctaaacaactgggtgtcattctgtttgaaaaattacagcttcccgtcctgaagaagacgaagaccggctatagtacgagtgctcgcgtgctcgagaaacttgccccgcagcatgaaatcgtcgagaaaattcttcactaccgtcagctcggtaaactgcaatccacatatattgaagggctgctgaaagttgtacatcgcgacacccataaagtccacaccatcttcaaccaggccctgactcaaaccgggcgcctgtcaagcaccgaacctaatctccagaacatcccaattcgtctggaagaaggccgcaaaattcgccaagcatttgtgccatcggaacctgactgggttatctttagcgcagattactcacagattgagctccgtgttctcgcacacattgcaaacgatgaaaatctgatcgatgcttttcgtcatgaccttgacatccatacgaagacagccatggatattttccatgtaacagcagatgaagttacccccaatatgcgtcgccaagcaaaagccgtgaacttcggtattgtctatgggatctctgattacggtctgagtcagaaccttgggatcccacgcaaagaagccgccgaatttattcgtcgttatttcgaaagctttcccggcgttaaacagtacatggagaatattgtacaggaagccaaacagaaaggatacgtcaccacccttttacaccgccgccgctatctgccagacatcacctctcgtaatttcaacttacgttcattcgcagaacgcacggccatgaacaccccaattcaaggatcagccgccgacatcatcaagaaggcaatgattgatttagctgatcgtctgaaaaaagagaaacttcaagctcgtatgctgctccaggttcatgacgaactgattcttgaagctcctcgtgaggaagtcgaacgcctggttcagattgtacccgaggtcatggagaacgccatccagttaaccgtcccactgaaagttgattatcactacggtcctacgtggtacgacgctaag

SEQ ID NO: 190 - protein, 604 aa, synthetic construct
  REGION 1..604: note = Variant of DNA polymerase
MHHHHHHGGSGMVAPQTKKEEAVLPNINYTIVEEVTEPILADRSALVVEVLESNYHKAPILGFALANEHGNFFIRTDTALSSPLFTAWLEDESKKKSVFDGKRAIVALKWKGIELRGIEFDLLIASYLLNPSQSTEDVASVAKTKQYMAVQSDEAVYGKGAKQTVPDENVLAEHLVRKAAAIRALEKELIHDLQENEQYALFTDLELPLSSILAEMEFTGVKVDVERLKEMGEELTEQLRQVEQEIYKLAGQEFNINSPKQLGVILFEKLQLPVLKKTKTGYSTSARVLEKLAPQHEIVEKILHYRQLGKLQSTYIEGLLKVVHRDTHKVHTIFNQALTQTGRLSSTEPNLQNIPIRLEEGRKIRQAFVPSEPDWVIFSADYSQIELRVLAHIANDENLIDAFRHDLDIHTKTAMDIFHVTADEVTPNMRRQAKAVNFGIVYGISDYGLSQNLGIPRKEAAEFIRRYFESFPGVKQYMENIVQEAKQKGYVTTLLHRRRYLPDITSRNFNLRSFAERTAMNTPIQGSAADIIKKAMIDLADRLKKEKLQARMLLQVHDELILEAPREEVERLVQIVPEVMENAIQLTVPLKVDYHYGPTWYDAK

SEQ ID NO: 191 - DNA, 1812 bp, synthetic construct
  misc_feature 1..1812: note = Variant of DNA polymerase
  source 1..1812: mol_type = other DNA
atgcatcaccatcaccatcacggtggcagcggtatggttgcaccacagaccaaaaaagaaatggccgtactgccgaacatcaattatacaattgtggaggaagtcaccgaaccgattctcgcggatcgttcggcgttagtggttgaggttctggaatccaactaccataaggctccgatcctgggctttgccctggccaatgaacacggtaacttcttcattcgcactgacacggctctttcttctccgctgtttaccgcgtggctggaggatgagagcaagaagaaatcagtattcgacggtaaacgcgcaatcgtggccctgaaatggaaaggcattgaattacgtggcatcgaatttgacttgttgatcgcttcatatctcctgaatccctcgcaaagcacggaagatgtcgcaagcgtggccaagaccaaacagtacatggcagtacagcgcgatgaagcagtctatggaaaaggtgcgaaacaaacggtgccagatgaaaacgttttagccgaacatctggtgcgtaaagctgctgcaattcgcgccctggagaaagaactgatccacgatttgcaggaaaatgaacaatacgccctgtttactgaccttgaattacctctgtcctcgattctggcagagatggaatttaccggtgtgaaagtagatgttgaacgcctgaaagaaatgggcgaggagctcacagaacaactgcgccaagtggagcaggaaatctataagttagctggccaagagttcaacattaacagccctaaacaactgggtgtcattctgtttgaaaaattacagcttcccgtcctgaagaagacgaagaccggctatagtacgagtgctcgcgtgctcgagaaacttgccccgcagcatgaaatcgtcgagaaaattcttctgtaccgtcagctcggtaaactgcaatccacatatattgaagggctgctgaaagttgtacatcgcgacacccataaagtccacaccatcttcaaccaggccctgactcaaaccgggcgcctgtcaagcaccgaacctaatctccagaacatcccaattcgtctggaagaaggccgcaaaattcgccaagcatttgtgccatcggaacctgactgggttatctttagcgcagattactcacagattgagctccgtgttctcgcacacattgcaaacgatgaaaatctgatcgatgcttttcgtcatgaccttgacatccatacgaagacagccatggatattttccatgtaacagcagatgaagttacccccaatatgcgtcgccaagcaaaagccgtgaacttcggtattgtctatgggatctctgattacggtctgagtcagaaccttgggatcccacgcaaagaagccgccgaatttattcgtcgttatttcgaaagctttcccggcgttaaacagtacatggagaatattgtacaggaagccaaacagaaaggatacgtcaccacccttttacaccgccgccgctatctgccagacatcacctctcgtaatttcaacttacgttcattcgcagaacgcacggccatgaacaccccaattcaaggatcagccgccgacatcatcaagaaggcaatgattgatttagctgatcgtctgaaacgcgagaaacttcaagctcgtatgctgctccaggttcatgacgaactgattcttgaagctcctcgtgaggaagtcgaacgcctgcagcagattgtacccgaggtcatggagaacgccatccagttaaccgtcccactgaaagttgattatcactacggtcctacgtggtacgacgctaag

SEQ ID NO: 192 - protein, 604 aa, synthetic construct
  REGION 1..604: note = Variant of DNA polymerase
MHHHHHHGGSGMVAPQTKKEMAVLPNINYTIVEEVTEPILADRSALVVEVLESNYHKAPILGFALANEHGNFFIRTDTALSSPLFTAWLEDESKKKSVFDGKRAIVALKWKGIELRGIEFDLLIASYLLNPSQSTEDVASVAKTKQYMAVQRDEAVYGKGAKQTVPDENVLAEHLVRKAAAIRALEKELIHDLQENEQYALFTDLELPLSSILAEMEFTGVKVDVERLKEMGEELTEQLRQVEQEIYKLAGQEFNINSPKQLGVILFEKLQLPVLKKTKTGYSTSARVLEKLAPQHEIVEKILLYRQLGKLQSTYIEGLLKVVHRDTHKVHTIFNQALTQTGRLSSTEPNLQNIPIRLEEGRKIRQAFVPSEPDWVIFSADYSQIELRVLAHIANDENLIDAFRHDLDIHTKTAMDIFHVTADEVTPNMRRQAKAVNFGIVYGISDYGLSQNLGIPRKEAAEFIRRYFESFPGVKQYMENIVQEAKQKGYVTTLLHRRRYLPDITSRNFNLRSFAERTAMNTPIQGSAADIIKKAMIDLADRLKREKLQARMLLQVHDELILEAPREEVERLQQIVPEVMENAIQLTVPLKVDYHYGPTWYDAK

SEQ ID NO: 193 - DNA, 1812 bp, synthetic construct
  misc_feature 1..1812: note = Variant of DNA polymerase
  source 1..1812: mol_type = other DNA
atgcatcaccatcaccatcacggtggcagcggtatggttgcaccacagaccaaaaaagaagaggccgtactgccgaacatcaattatacaattgtggaggaagtcaccgaaccgattctcgcggatcgttcggcgttagtggttgaggttctggaatccaactaccataaggctccgatcctgggctttgccctggccaatgaacacggtaacttcttcattcgcactgacacggctctttcttctccgctgtttaccgcgtggctggaggatgagagcaagaagaaatcagtattcgacggtaaacgcgcaatcgtggccctgaaatggaaaggcattgaattacgtggcatcgaatttgacttgttgatcgcttcatatctcctgaatccctcgcaaagcacggaagatgtcgcaagcgtggccaagaccaaacagtacatggcagtacagcgcgatgaagcagtctatggaaaaggtgcgaaacaaacggtgccagatgaaaacgttttagccgaacatctggtgcgtaaagctgctgcaattcgcgccctggagaaagaactgatccacgatttgcaggaaaatgaacaatacgccctgtttactgaccttgaattacctctgtcctcgattctggcagagatggaatttaccggtgtgaaagtagatgttgaacgcctgaaagaaatgggcgaggagctcacagaacaactgcgccaagtggagcaggaaatctataagttagctggccaacgcttcaacattaacagccctaaacaactgggtgtcattctgtttgaaaaattacagcttcccgtcctgaagaagacgaagaccggctatagtacgagtgctgatgtgctcgagaaacttgccccgaaacatgaaatcgtcgagaaaattcttctgtaccgtcagctcggtaaactgcaatccacatatattgaagggctgctgaaagttgtacatcgcgacacccataaagtccacaccatcttcaaccaggccctgactcaaaccgggcgcctgtcaagcaccgaacctaatctccagaacatcccaattcgtctggaagaaggccgcaaaattcgccaagcatttgtgccatcggaacctgactgggttatctttagcgcagattactcacagattgagctccgtgttctcgcacacattgcaaacgatgaaaatctgatcgatgcttttcgtcatgaccttgacatccatacgaagacagccatggatattttccatgtaacagcagatgaagttacccccaatatgcgtcgccaagcaaaagccgtgaacttcggtattgtctatgggatctctgattacggtctgagtcagaaccttaacatcccacgcaaagaagccgccgaatttattcgtcgttatttcgaaagctttcccggcgttaaacagtacatggagaatattgtacaggaagccaaacagaaaggatacgtcaccacccttttacaccgccgccgctatctgccagacatcacctctcgtaatttcaacttacgttcattcgcagaacgcacggccatgaacaccccaattcaaggatcagccgccgacatcatcaagaaggcaatgattgatttagctcgtcgtctgaaacgcgagaaacttcaagctcgtatgctgctccaggttcatgacgaactgattcttgaagctcctcgtgaggaagtcgaacgcctggttcagattgtacccgaggtcatggagaacgccatccagttaaccgtcccactgaaagttgattatcactacggtcctacgtggtacgacgctaag

SEQ ID NO: 194 - protein, 604 aa, synthetic construct
  REGION 1..604: note = Variant of DNA polymerase
MHHHHHHGGSGMVAPQTKKEEAVLPNINYTIVEEVTEPILADRSALVVEVLESNYHKAPILGFALANEHGNFFIRTDTALSSPLFTAWLEDESKKKSVFDGKRAIVALKWKGIELRGIEFDLLIASYLLNPSQSTEDVASVAKTKQYMAVQRDEAVYGKGAKQTVPDENVLAEHLVRKAAAIRALEKELIHDLQENEQYALFTDLELPLSSILAEMEFTGVKVDVERLKEMGEELTEQLRQVEQEIYKLAGQRFNINSPKQLGVILFEKLQLPVLKKTKTGYSTSADVLEKLAPKHEIVEKILLYRQLGKLQSTYIEGLLKVVHRDTHKVHTIFNQALTQTGRLSSTEPNLQNIPIRLEEGRKIRQAFVPSEPDWVIFSADYSQIELRVLAHIANDENLIDAFRHDLDIHTKTAMDIFHVTADEVTPNMRRQAKAVNFGIVYGISDYGLSQNLNIPRKEAAEFIRRYFESFPGVKQYMENIVQEAKQKGYVTTLLHRRRYLPDITSRNFNLRSFAERTAMNTPIQGSAADIIKKAMIDLARRLKREKLQARMLLQVHDELILEAPREEVERLVQIVPEVMENAIQLTVPLKVDYHYGPTWYDAK

SEQ ID NO: 195 - DNA, 1812 bp, synthetic construct
  misc_feature 1..1812: note = Variant of DNA polymerase
  source 1..1812: mol_type = other DNA
atgcatcaccatcaccatcacggtggcagcggtatggttgcaccacagaccaaaaaagaagaggccgtactgccgaacatcaattatacaattgtggaggaagtcaccgaaccgattctcgcggatcgttcggcgttagtggttgaggttctggaatccaactaccataaggctccgatcctgggctttgccctggccaatgaacacggtaacttcttcattcgcactgacacggctctttcttctccgctgtttaccgcgtggctggaggatgagagcaagaagaaatcagtattcgacggtaaacgcgcaatcgtggccctgaaatggaaaggcattgaattacgtggcatcgaatttgacttgttgatcgcttcatatctcctgaatccctcgcaaagcacggaagatgtcgcaagcgtggccaagaccaaacagtacatggcagtacagcgcgatgaagcagtctatggaaaaggtgcgaaacaaacggtgccagatgaaaacgttttagccgaacatctggtgcgtaaagctgctgcaattcgcgccctggagaaagaactgatccacgatttgcaggaaaatgaacaatacgccctgtttactgaccttgaattacctctgtcctcgattctggcagagatggaatttaccggtgtgaaagtagatgttgaacgcctgaaagaaatgggcgaggagctcacagaacaactgcgccaagtggagcaggaaatctataagttagctggccaacgcttcaacattaacagccctaaacaactgggtgtcattctgtttgaaaaattacagcttcccgtcctgaagaagacgaagaccggctatagtacgagtgctcgcgtgctcgagaaacttgccccgcagcatgaaatcgtcgagaaaattcttctgtaccgtcagctcggtaaactgcaatccacatatattgaagggctgctgaaagttgtacatcgcgacacccataaagtccacaccatcttcaaccaggccctgactcaaaccgggcgcctgtcaagcaccgaacctaatctccagaacatcccaattcgtctggaagaaggccgcaaaattcgccaagcatttgtgccatcggaacctgactgggttatctttagcgcagattactcacagattgagctccgtgttctcgcacacattgcaaacgatgaaaatctgatcgatgcttttcgtcatgaccttgacatccatacgaagacagccatggatattttccatgtaacagcagatgaagttacccccaatatgcgtcgccaagcaaaagccgtgaacttcggtattgtctatgggatctctgattacggtctgagtcagaaccttgggatcccacgcaaagaagccgccgaatttattcgtcgttatttcgaaagctttcccggcgttaaacagtacatggagaatattgtacaggaagccaaacagaaaggatacgtcaccacccttttacaccgccgccgctatctgccagacatcacctctcgtaatttcaacttacgttcattcgcagaacgcacggccatgaacaccccaattcaaggatcagccgccgacatcatcaagaaggcaatgattgatttagctgatcgtctgaaacgcgagaaacttcaagctcgtatgctgctccaggttcatgacgaactgattcttgaagctcctcgtgaggaagtcgaacgcctgcagcagattgtacccgaggtcatggagaacgccatccagttaaccgtcccactgaaagttgattatcactacggtcctacgtggtacgacgctaag

SEQ ID NO: 196 - protein, 604 aa, synthetic construct
  REGION 1..604: note = Variant of DNA polymerase
MHHHHHHGGSGMVAPQTKKEEAVLPNINYTIVEEVTEPILADRSALVVEVLESNYHKAPILGFALANEHGNFFIRTDTALSSPLFTAWLEDESKKKSVFDGKRAIVALKWKGIELRGIEFDLLIASYLLNPSQSTEDVASVAKTKQYMAVQRDEAVYGKGAKQTVPDENVLAEHLVRKAAAIRALEKELIHDLQENEQYALFTDLELPLSSILAEMEFTGVKVDVERLKEMGEELTEQLRQVEQEIYKLAGQRFNINSPKQLGVILFEKLQLPVLKKTKTGYSTSARVLEKLAPQHEIVEKILLYRQLGKLQSTYIEGLLKVVHRDTHKVHTIFNQALTQTGRLSSTEPNLQNIPIRLEEGRKIRQAFVPSEPDWVIFSADYSQIELRVLAHIANDENLIDAFRHDLDIHTKTAMDIFHVTADEVTPNMRRQAKAVNFGIVYGISDYGLSQNLGIPRKEAAEFIRRYFESFPGVKQYMENIVQEAKQKGYVTTLLHRRRYLPDITSRNFNLRSFAERTAMNTPIQGSAADIIKKAMIDLADRLKREKLQARMLLQVHDELILEAPREEVERLQQIVPEVMENAIQLTVPLKVDYHYGPTWYDAK

SEQ ID NO: 197 - DNA, 1812 bp, synthetic construct
  misc_feature 1..1812: note = Variant of DNA polymerase
  source 1..1812: mol_type = other DNA
atgcatcaccatcaccatcacggtggcagcggtatggttgcaccacagaccaaaaaagaagaagccgtactgccgaacatcaattatacaattgtggaggaagtcaccgaaccgattctcgcggatcgttcggcgttagtggttgaggttctggaatccaactaccataaggctccgatcctgggctttgccctggccaatgaacacggtaacttcttcattcgcactgacacggctctttcttctccgctgtttaccgcgtggctggaggatgagagcaagaagaaatcagtattcgacggtaaacgcgcaatcgtggccctgaaatggaaaggcattgaattacgtggcatcgaatttgacttgttgatcgcttcatatctcctgaatccctcgcaaagcacggaagatgtcgcaagcgtggccaagaccaaacagtacatggcagtacagcgcgatgaagcagtctatggaaaaggtgcgaaacaaacggtgccagatgaaaacgttttagccgaacatctggtgcgtaaagctgctgcaattcgcgccctggagaaagaactgatccacgatttgcaggaaaatgaacaatacgccctgtttactgaccttgaattacctctgtcctcgattctggcagagatggaatttaccggtgtgaaagtagatgttgaacgcctgaaagaaatgggcgaggagctcacagaacaactgcgccaagtggagcaggaaatctataagttagctggccaagagttcaacattaacagccctaaacaactgggtgtcattctgtttgaaaaattacagcttcccgtcctgaagaagacgaagaccggctatagtacgagtgctgatgtgctcgagaaacttgccccgcagcatgaaatcgtcgagaaaattcttcactaccgtcagctcggtaaactgcaatccacatatattgaagggctgctgaaagttgtacatcgcgacacccataaagtccacaccatcttcaaccaggccctgactcaaaccgggcgcctgtcaagcaccgaacctaatctccagaacatcccaattcgtctggaagaaggccgcaaaattcgccaagcatttgtgccatcggaacctgactgggttatctttagcgcagattactcacagattgagctccgtgttctcgcacacattgcaaacgatgaaaatctgatcgatgcttttcgtcatgaccttgacatccatacgaagacagccatggatattttccatgtaacagcagatgaagttacccccaatatgcgtcgccaagcaaaagccgtgaacttcggtattgtctatgggatctctgattacggtctgagtcagaaccttgggatcccacgcaaagaagccgccgaatttattcgtcgttatttcgaaagctttcccggcgttaaacagtacatggagaatattgtacaggaagccaaacagaaaggatacgtcaccacccttttacaccgccgccgctatctgccagacatcacctctcgtaatttcaacttacgttcattcgcagaacgcacggccatgaacaccccaattcaaggatcagccgccgacatcatcaagaaggcaatgattgatttagctgatcgtctgaaacgcgagaaacttcaagctcgtatgctgctccaggttcatgacgaactgattcttgaagctcctcgtgaggaagtcgaacgcctggttcagattgtacccgaggtcatggagaacgccatccagttaaccgtcccactgaaagttgattatcactacggtcctacgtggtacgacgctaag

SEQ ID NO: 198 - protein, 604 aa, synthetic construct
  REGION 1..604: note = Variant of DNA polymerase
MHHHHHHGGSGMVAPQTKKEEAVLPNINYTIVEEVTEPILADRSALVVEVLESNYHKAPILGFALANEHGNFFIRTDTALSSPLFTAWLEDESKKKSVFDGKRAIVALKWKGIELRGIEFDLLIASYLLNPSQSTEDVASVAKTKQYMAVQRDEAVYGKGAKQTVPDENVLAEHLVRKAAAIRALEKELIHDLQENEQYALFTDLELPLSSILAEMEFTGVKVDVERLKEMGEELTEQLRQVEQEIYKLAGQEFNINSPKQLGVILFEKLQLPVLKKTKTGYSTSADVLEKLAPQHEIVEKILHYRQLGKLQSTYIEGLLKVVHRDTHKVHTIFNQALTQTGRLSSTEPNLQNIPIRLEEGRKIRQAFVPSEPDWVIFSADYSQIELRVLAHIANDENLIDAFRHDLDIHTKTAMDIFHVTADEVTPNMRRQAKAVNFGIVYGISDYGLSQNLGIPRKEAAEFIRRYFESFPGVKQYMENIVQEAKQKGYVTTLLHRRRYLPDITSRNFNLRSFAERTAMNTPIQGSAADIIKKAMIDLADRLKREKLQARMLLQVHDELILEAPREEVERLVQIVPEVMENAIQLTVPLKVDYHYGPTWYDAK

SEQ ID NO: 199 - DNA, 1812 bp, synthetic construct
  misc_feature 1..1812: note = Variant of DNA polymerase
  source 1..1812: mol_type = other DNA
atgcatcaccatcaccatcacggtggcagcggtatggttgcaccacagaccaaaaaagaagaagccgtactgccgaacatcaattatacaattgtggaggaagtcaccgaaccgattctcgcggatcgttcggcgttagtggttgaggttctggagtccaactaccataaggctccgatcctgggctttgccctggccaatgaacacggtaacttcttcattcgcactgacacggctctttcttctccgctgtttaccgcgtggctggaggatgagagcaagaagaaatcagtattcgacggtaaacgcgcaatcgtggccctgaaatggaaaggcattgaattacgtggcatcgaatttgacttgttgctggcttcatatctcctgaatccctcgcaaagcacggaagatgtcgcaagcgtggccaagaccaaacagtacatggcagtacagagtgatgaagcagtctatggaaaaggtgcgaaacaaacggtgccagatgaaaacgttttagccgaacatctggtgcgtaaagctgctgcaattcgcgccctggagaaagaactgatccacgatttgcaggaaaatgaacaatacgccctgtttactgaccttgaattacctctgtcctcgattctggcagagatggaatttaccggtgtgaaagtagatgttgaacgcctgaaagaaatgggcgaggagctcacagaacaactgcgccaagtggagcaggaaatctataagttagctggccaagaattcaacattaacagccctaaacaactgggtgtcattctgtttgaaaaattacagcttcccgtcctgaagaagacgaagaccggctatagtacgagtgctgatgtgctcgagaaacttgcccgtcagcatgaaatcgtcgagaaaattcttcactaccgtcagctcggtaaactgcaatccacatatattgaagggctgctgaaagttgtacatcgcgacacccataaagtccacaccatcttcaaccaggccctgactcaaaccgggcgcctgtcaagcaccgaacctaatctccagaacatcccaattcgtctggaagaaggccgcaaaattcgccaagcatttgtgccatcgaaacctgactgggttatctttagcgcagattactcacagattgagctccgtgttctcgcacacattgcaaacgatgaaaatctgatcgatgcttttcgtcatgaccttgacatccatacgaagacagccatggatattttccatgtaacagcagatgaagttacccccaatatgcgtcgccaagcaaaagccgtgaacttcggtattgtctatgggatctctgattacggtctgagtcagaatcttaatatcccacgcaaagaagccgccgaatttattcgtcgttatttcgaaagctttcccggcgttaaacagtacatggagaatattgtacaggaagccaaacagaaaggatacgtcaccacccttttacaccgccgccgctatctgccagacatcacctctcgtaatcgtaacttacgttcattcgcagaacgcacggccatgaacaccccaattcaaggatcagccgccgacatcatcaagaaggcaatgattgatttagctgatcgtctgaaacgcgagaaacttcaagctcgtatgctgctccaggttcatgacgaactgattcttgaagctcctcgtgaggaagtcgaacgcctgcagcagattgtacccgaggtcatggagaacgccatccagttaaccgtcccactgaaagttagctatcactacggtcctacgtggtacgacgctaag

SEQ ID NO: 200 - protein, 604 aa, synthetic construct
  REGION 1..604: note = Variant of DNA polymerase
MHHHHHHGGSGMVAPQTKKEEAVLPNINYTIVEEVTEPILADRSALVVEVLESNYHKAPILGFALANEHGNFFIRTDTALSSPLFTAWLEDESKKKSVFDGKRAIVALKWKGIELRGIEFDLLLASYLLNPSQSTEDVASVAKTKQYMAVQSDEAVYGKGAKQTVPDENVLAEHLVRKAAAIRALEKELIHDLQENEQYALFTDLELPLSSILAEMEFTGVKVDVERLKEMGEELTEQLRQVEQEIYKLAGQEFNINSPKQLGVILFEKLQLPVLKKTKTGYSTSADVLEKLARQHEIVEKILHYRQLGKLQSTYIEGLLKVVHRDTHKVHTIFNQALTQTGRLSSTEPNLQNIPIRLEEGRKIRQAFVPSKPDWVIFSADYSQIELRVLAHIANDENLIDAFRHDLDIHTKTAMDIFHVTADEVTPNMRRQAKAVNFGIVYGISDYGLSQNLNIPRKEAAEFIRRYFESFPGVKQYMENIVQEAKQKGYVTTLLHRRRYLPDITSRNRNLRSFAERTAMNTPIQGSAADIIKKAMIDLADRLKREKLQARMLLQVHDELILEAPREEVERLQQIVPEVMENAIQLTVPLKVSYHYGPTWYDAK

SEQ ID NO: 201 - DNA, 1812 bp, synthetic construct
  misc_feature 1..1812: note = Variant of DNA polymerase
  source 1..1812: mol_type = other DNA
atgcatcaccatcaccatcacggtggcagcggtatggttgcaccacagaccaaaaaagaagaagccgtactgccgaacatcaattatacaattgtggaggaagtcaccgaaccgattctcgcggatcgttcggcgttagtggttgaggttctggaatccaactaccataaggctccgatcctgggctttgccctggccaatgaacacggtaacttcttcattcgcactgacacggctctttcttctccgctgtttaccgcgtggctggaggatgagagcaagaagaaatcagtattcgacggtaaacgcgcaatcgtggccctgaaatggaaaggcattgaattacgtggcatcgaatttgacttgttgatcgcttcatatctcctgaatccctcgcaaagcacggaagatgtcgcaagcgtggccaagaccaaacagtacatggcagtacagcgcgatgaagcagtctatggaaaaggtgcgaaacaaacggtgccagatgaaaacgttttagccgaacatctggtgcgtaaagctgctgcaattcgcgccctggagaaagaactgatccacgatttgcaggaaaatgaacaatacgccctgtttactgaccttgaattacctctgtcctcgattctggcagagatggaatttaccggtgtgaaagtagatgttgaacgcctgaaagaaatgggcgaggagctcacagaacaactgcgccaagtggagcaggaaatctataagttagctggccaacgcttcaacattaacagccctaaacaactgggtgtcattctgtttgaaaaattacagcttcccgtcctgaagaagacgaagaccggctatagtacgagtgctgatgtgctcgagaaacttgccccgaaacatgaaatcgtcgagaaaattcttcattaccgtcagctcggtaaactgcaatccacatatattgaagggctgctgaaagttgtacatcgcgacacccataaagtccacaccatcttcaaccaggccctgactcaaaccgggcgcctgtcaagcaccgaacctaatctccagaacatcccaattcgtctggaagaaggccgcaaaattcgccaagcatttgtgccatcggaacctgactgggttatctttagcgcagattactcacagattgagctccgtgttctcgcacacattgcaaacgatgaaaatctgatcgatgcttttcgtcatgaccttgacatccatacgaagacagccatggatattttccatgtaacagcagatgaagttacccccaatatgcgtcgccaagcaaaagccgtgaacttcggtattgtctatgggatctctgattacggtctgagtcagaaccttgggatcccacgcaaagaagccgccgaatttattcgtcgttatttcgaaagctttcccggcgttaaacagtacatggagaatattgtacaggaagccaaacagaaaggatacgtcaccacccttttacaccgccgccgctatctgccagacatcacctctcgtaatttcaacttacgttcattcgcagaacgcacggccatgaacaccccaattcaaggatcagccgccgacatcatcaagaaggcaatgattgatttagctgaccgtctgaaacgcgagaaacttcaagctcgtatgctgctccaggttcatgacgaactgattcttgaagctcctcgtgaggaagtcgaacgcctgcagcagattgtacccgaggtcatggagaacgccatccagttaaccgtcccactgaaagttgattatcactacggtcctacgtggtacgacgctaag

SEQ ID NO: 202 - protein, 604 aa, synthetic construct
  REGION 1..604: note = Variant of DNA polymerase
MHHHHHHGGSGMVAPQTKKEEAVLPNINYTIVEEVTEPILADRSALVVEVLESNYHKAPILGFALANEHGNFFIRTDTALSSPLFTAWLEDESKKKSVFDGKRAIVALKWKGIELRGIEFDLLIASYLLNPSQSTEDVASVAKTKQYMAVQRDEAVYGKGAKQTVPDENVLAEHLVRKAAAIRALEKELIHDLQENEQYALFTDLELPLSSILAEMEFTGVKVDVERLKEMGEELTEQLRQVEQEIYKLAGQRFNINSPKQLGVILFEKLQLPVLKKTKTGYSTSADVLEKLAPKHEIVEKILHYRQLGKLQSTYIEGLLKVVHRDTHKVHTIFNQALTQTGRLSSTEPNLQNIPIRLEEGRKIRQAFVPSEPDWVIFSADYSQIELRVLAHIANDENLIDAFRHDLDIHTKTAMDIFHVTADEVTPNMRRQAKAVNFGIVYGISDYGLSQNLGIPRKEAAEFIRRYFESFPGVKQYMENIVQEAKQKGYVTTLLHRRRYLPDITSRNFNLRSFAERTAMNTPIQGSAADIIKKAMIDLADRLKREKLQARMLLQVHDELILEAPREEVERLQQIVPEVMENAIQLTVPLKVDYHYGPTWYDAK

SEQ ID NO: 203 - DNA, 1812 bp, synthetic construct
  misc_feature 1..1812: note = Variant of DNA polymerase
  source 1..1812: mol_type = other DNA
atgcatcaccatcaccatcacggtggcagcggtatggttgcaccacagaccaaaaaagaagaagccgtactgccgaacatcaattatacaattgtggaggaagtcaccgaaccgattctcgcggatcgttcggcgttagtggttgaggttctggagtccaactaccataaggctccgatcctgggctttgccctggccaatgaacacggtaacttcttcattcgcactgacacggctctttcttctccgctgtttaccgcgtggctggaggatgagagcaagaagaaatcagtattcgacggtaaacgcgcaatcgtggccctgaaatggaaaggcattgaattacgtggcatcgaatttgacttgttgatcgcttcatatctcctgaatccctcgcaaagcacggaagatgtcgcaagcgtggccaagaccaaacagtacatggcagtacagagtgattgggcagtctatggaaaaggtgcgaaacaaacggtgccagatgaaaacgttttagccgaacatctggtgcgtaaagctgctgcaattcgcgccctggagaaagaactgatccacgatttgcaggaaaatgaacaatacgccctgtttactgaccttgaattacctctgtcctcgattctggcagagatggaatttaccggtgtgaaagtagatgttgaacgcctgaaagaaatgggcgaggagctcacagaacaactgcgccaagtggagcaggaaatctataagttagctggccaagaattcaacattaacagccctaaacaactgggtgtcattctgtttgaaaaattacagcttcccgtcctgaagaagacgaagaccggctatagtacgagtgctgatgtgctcgagaaacttgccccgcagcatgaaatcgtccgcaaaattcttcactaccgtcagctcggtaaactgcaatccacatatattgaagggctgctgaaagttgtacatcgcgacacccataaagtccacaccatcttcaaccaggccctgactcaaaccgggcgcctgtcaagcaccgaacctaatctccagaacatcccaattcgtctggaagaaggccgcaaaattcgccaagcatttgtgccatcggaacctgactgggttatctttagcgcagattactcacagattgagctccgtgttctcgcacacattgcaaacgatgaaaatctgatcgatgcttttcgtcatgaccttgacatccatacgaagacagccatggatattttccatgtaacagcagatgaagttacccccaatatgcgtcgccaagcaaaagccgtgaacttcggtattgtctatgggatctctgattacggtctgagtcagagtcttaatatcccacgcaaagaagccgccgaatttattcgtcgttatttcgaaagctttcccggcgttaaacagtacatggagaatattgtacaggaagccaaacagaaaggatacgtcaccacccttttacaccgccgccgctatctgccagacatcacctctcgtaatttcaacttacgttcattcgcagaacgcacggccatgaacaccccaattcaaggatcagccgccgacatcatcaagaaggcaatgattgatttagctgatcgtctgaaacgcgagaaacttcaagctcgtatgctgctccaggttcatgacgaactgattcttgaagctcctcgtgaggaagtcgaacgcctgcagcagattgtacccgaggtcatggagaacgccatccagttaaccgtcccactgaaagttgattatcactacggtcctacgtggtacgacgctaag

SEQ ID NO: 204 - protein, 604 aa, synthetic construct
  REGION 1..604: note = Variant of DNA polymerase
MHHHHHHGGSGMVAPQTKKEEAVLPNINYTIVEEVTEPILADRSALVVEVLESNYHKAPILGFALANEHGNFFIRTDTALSSPLFTAWLEDESKKKSVFDGKRAIVALKWKGIELRGIEFDLLIASYLLNPSQSTEDVASVAKTKQYMAVQSDWAVYGKGAKQTVPDENVLAEHLVRKAAAIRALEKELIHDLQENEQYALFTDLELPLSSILAEMEFTGVKVDVERLKEMGEELTEQLRQVEQEIYKLAGQEFNINSPKQLGVILFEKLQLPVLKKTKTGYSTSADVLEKLAPQHEIVRKILHYRQLGKLQSTYIEGLLKVVHRDTHKVHTIFNQALTQTGRLSSTEPNLQNIPIRLEEGRKIRQAFVPSEPDWVIFSADYSQIELRVLAHIANDENLIDAFRHDLDIHTKTAMDIFHVTADEVTPNMRRQAKAVNFGIVYGISDYGLSQSLNIPRKEAAEFIRRYFESFPGVKQYMENIVQEAKQKGYVTTLLHRRRYLPDITSRNFNLRSFAERTAMNTPIQGSAADIIKKAMIDLADRLKREKLQARMLLQVHDELILEAPREEVERLQQIVPEVMENAIQLTVPLKVDYHYGPTWYDAK

SEQ ID NO: 205 - DNA, 1812 bp, synthetic construct
  misc_feature 1..1812: note = Variant of DNA polymerase
  source 1..1812: mol_type = other DNA
atgcatcaccatcaccatcacggtggcagcggtatggttgcaccacagaccaaaaaagaagaagccgtactgccgaacatcaattatacaattgtggaggaagtcaccgaaccgattctcgcggatcgttcggcgttagtggttgaggttctggaatccaactaccataaggctccgatcctgggctttgccctggccaatgaacacggtaacttcttcattcgcactgacacggctctttcttctccgctgtttaccgcgtggctggaggatgagagcaagaagaaatcagtattcgacggtaaacgcgcaatcgtggccctgaaatggaaaggcattgaattacgtggcatcgaatttgacttgttgatcgcttcatatctcctgaatccctcgcaaagcacggaagatgtcgcaagcgtggccaagaccaaacagtacatggcagtacagagtgatgaagcagtctatggaaaaggtgcgaaacaaacggtgccagatgaaaacgttttagccgaacatctggtgcgtaaagctgctgcaattcgcgccctggagaaagaactgatccacgatttgcaggaaaatgaacaatacgccctgtttactgaccttgaattacctctgtcctcgattctggcagagatggaatttaccggtgtgaaagtagatgttgaacgcctgaaagaaatgggcgaggagctcacagaacaactgcgccaagtggagcaggaaatctataagttagctggccaagagttcaacattaacagccctaaacaactgggtgtcattctgtttgaaaaattacagcttcccgtcctgaagaagacgaagaccggctatagtacgagtgctcgcgtgctcgagaaacttgccccgcaacatgaaatcgtcgagaaaattcttctgtaccgtcagctcggtaaactgcaatccacatatattgaagggctgctgaaagttgtacatcgcgacacccataaagtccacaccatcttcaaccaggccctgactcaaaccgggcgcctgtcaagcaccgaacctaatctccagaacatcccaattcgtctggaagaaggccgcaaaattcgccaagcatttgtgccatcggaacctgactgggttatctttagcgcagattactcacagattgagctccgtgttctcgcacacattgcaaacgatgaaaatctgatcgatgcttttcgtcatgaccttgacatccatacgaagacagccatggatattttccatgtaacagcagatgaagttacccccaatatgcgtcgccaagcaaaagccgtgaacttcggtattgtctatgggatctctgattacggtctgagtcagaaccttaatatcccacgcaaagaagccgccgaatttattcgtcgttatttcgaaagctttcccggcgttaaacagtacatggagaatattgtacaggaagccaaacagaaaggatacgtcaccacccttttacaccgccgccgctatctgccagacatccactctcgtaatttcaacttacgttcattcgcagaacgcacggccatgaacaccccaattcaaggatcagccgccgacatcatcaagaaggcaatgattgatttagctgatcgtctgaaacgcgagaaacttcaagctcgtatgctgctccaggttcatgacgaactgattcttgaagctcctcgtgaggaagtcgaacgcctgcagcagattgtacccgaggtcatggagaacgccatccagttaaccgtcccactgaaagttgattatcactacggtcctacgtggtacgacgctaag

SEQ ID NO: 206 - protein, 604 aa, synthetic construct
  REGION 1..604: note = Variant of DNA polymerase
MHHHHHHGGSGMVAPQTKKEEAVLPNINYTIVEEVTEPILADRSALVVEVLESNYHKAPILGFALANEHGNFFIRTDTALSSPLFTAWLEDESKKKSVFDGKRAIVALKWKGIELRGIEFDLLIASYLLNPSQSTEDVASVAKTKQYMAVQSDEAVYGKGAKQTVPDENVLAEHLVRKAAAIRALEKELIHDLQENEQYALFTDLELPLSSILAEMEFTGVKVDVERLKEMGEELTEQLRQVEQEIYKLAGQEFNINSPKQLGVILFEKLQLPVLKKTKTGYSTSARVLEKLAPQHEIVEKILLYRQLGKLQSTYIEGLLKVVHRDTHKVHTIFNQALTQTGRLSSTEPNLQNIPIRLEEGRKIRQAFVPSEPDWVIFSADYSQIELRVLAHIANDENLIDAFRHDLDIHTKTAMDIFHVTADEVTPNMRRQAKAVNFGIVYGISDYGLSQNLNIPRKEAAEFIRRYFESFPGVKQYMENIVQEAKQKGYVTTLLHRRRYLPDIHSRNFNLRSFAERTAMNTPIQGSAADIIKKAMIDLADRLKREKLQARMLLQVHDELILEAPREEVERLQQIVPEVMENAIQLTVPLKVDYHYGPTWYDAK

SEQ ID NO: 207 - DNA, 1812 bp, synthetic construct
  misc_feature 1..1812: note = Variant of DNA polymerase
  source 1..1812: mol_type = other DNA
atgcatcaccatcaccatcacggtggcagcggtatggttgcaccacagaccaaaaaagaagaggccgtactgccgaacatcaattatacaattgtggaggaagtcaccgaaccgattctcgcggatcgttcggcgttagtggttgaggttctggaatccaactaccataaggctccgatcctgggctttgccctggccaatgaacacggtaacttcttcattcgcactgacacggctctttcttctccgctgtttaccgcgtggctggaggatgagagcaagaagaaatcagtattcgacggtaaacgcgcaatcgtggccctgaaatggaaaggcattgaattacgtggcatcgaatttgacttgttgatcgcttcatatctcctgaatccctcgcaaagcacggaagatgtcgcaagcgtggccaagaccaaacagtacatggcagtacagcgcgatgaagcagtctatggaaaaggtgcgaaacaaacggtgccagatgaaaacgttttagccgaacatctggtgcgtaaagctgctgcaattcgcgccctggagaaagaactgatccacgatttgcaggaaaatgaacaatacgccctgtttactgaccttgaattacctctgtcctcgattctggcagagatggaatttaccggtgtgaaagtagatgttgaacgcctgaaagaaatgggcgaggagctcacagaacaactgcgccaagtggagcaggaaatctataagttagctggccaacgcttcaacattaacagccctaaacaactgggtgtcattctgtttgaaaaattacagcttcccgtcctgaagaagacgaagaccggctatagtacgagtgctgatgtgctcgagaaacttgccccgcagcatgaaatcgtcgagaaaattcttcattaccgtcagctcggtaaactgcaatccacatatattgaagggctgctgaaagttgtacatcgcgacacccataaagtccacaccatcttcaaccaggccctgactcaaaccgggcgcctgtcaagcaccgaacctaatctccagaacatcccaattcgtctggaagaaggccgcaaaattcgccaagcatttgtgccatcggaacctgactgggttatctttagcgcagattactcacagattgagctccgtgttctcgcacacattgcaaacgatgaaaatctgatcgatgcttttcgccatgaccttgacatccatacgaagacagccatggatattttccatgtaacagcagatgaagttacccccaatatgcgtcgccaagcaaaagccgtgaacttcggtattgtctatgggatctctgattacggtctgagtcagaaccttgggatcccacgcaaagaagccgccgaatttattcgtcgttatttcgaaagctttcccggcgttaaacagtacatggagaatattgtacaggaagccaaacagaaaggatacgtcaccacccttttacaccgccgccgctatctgccagacatccactctcgtaatttcaacttacgttcattcgcagaacgcacggccatgaacaccccaattcaaggatcagccgccgacatcatcaagaaggcaatgattgatttagctgatcgtctgaaacgcgagaaacttcaagctcgtatgctgctccaggttcatgacgaactgattcttgaagctcctcgtgaggaagtcgaacgcctgcagcagattgtacccgaggtcatggagaacgccatccagttaaccgtcccactgaaagttgattatcactacggtcctacgtggtacgacgctaag

SEQ ID NO: 208 - protein, 604 aa, synthetic construct
  REGION 1..604: note = Variant of DNA polymerase
MHHHHHHGGSGMVAPQTKKEEAVLPNINYTIVEEVTEPILADRSALVVEVLESNYHKAPILGFALANEHGNFFIRTDTALSSPLFTAWLEDESKKKSVFDGKRAIVALKWKGIELRGIEFDLLIASYLLNPSQSTEDVASVAKTKQYMAVQRDEAVYGKGAKQTVPDENVLAEHLVRKAAAIRALEKELIHDLQENEQYALFTDLELPLSSILAEMEFTGVKVDVERLKEMGEELTEQLRQVEQEIYKLAGQRFNINSPKQLGVILFEKLQLPVLKKTKTGYSTSADVLEKLAPQHEIVEKILHYRQLGKLQSTYIEGLLKVVHRDTHKVHTIFNQALTQTGRLSSTEPNLQNIPIRLEEGRKIRQAFVPSEPDWVIFSADYSQIELRVLAHIANDENLIDAFRHDLDIHTKTAMDIFHVTADEVTPNMRRQAKAVNFGIVYGISDYGLSQNLGIPRKEAAEFIRRYFESFPGVKQYMENIVQEAKQKGYVTTLLHRRRYLPDIHSRNFNLRSFAERTAMNTPIQGSAADIIKKAMIDLADRLKREKLQARMLLQVHDELILEAPREEVERLQQIVPEVMENAIQLTVPLKVDYHYGPTWYDAK

SEQ ID NO: 209 - DNA, 1812 bp, synthetic construct
  misc_feature 1..1812: note = Variant of DNA polymerase
  source 1..1812: mol_type = other DNA
atgcatcaccatcaccatcacggtggcagcggtatggttgcaccacagaccaaaaaagaagaggccgtactgccgaacatcaattatacaattgtggaggaagtcaccgaaccgattctcgcggatcgttcggcgttagtggttgaggttctggaatccaactaccataaggctccgatcctgggctttgccctggccaatgaacacggtaacttcttcattcgcactgacacggctctttcttctccgctgtttaccgcgtggctggaggatgagagcaagaagaaatcagtattcgacggtaaacgcgcaatcgtggccctgaaatggaaaggcattgaattacgtggcatcgaatttgacttgttgatcgcttcatatctcctgaatccctcgcaaagcacggaagatgtcgcaagcgtggccaagaccaaacagtacatggcagtacagagtgatgaagcagtctatggaaaaggtgcgaaacaaacggtgccagatgaaaacgttttagccgaacatctggtgcgtaaagctgctgcaattcgcgccctggagaaagaactgatccacgatttgcaggaaaatgaacaatacgccctgtttactgaccttgaattacctctgtcctcgattctggcagagatggaatttaccggtgtgaaagtagatgttgaacgcctgaaagaaatgggcgaggagctcacagaacaactgcgccaagtggagcaggaaatctataagttagctggccaacgcttcaacattaacagccctaaacaactgggtgtcattctgtttgaaaaattacagcttcccgtcctgaagaagacgaagaccggctatagtacgagtgctgatgtgctcgagaaacttgccccgcagcatgaaatcgtcgagaaaattcttcattaccgtcagctcggtaaactgcaatccacatatattgaagggctgctgaaagttgtacatcgcgacacccataaagtccacaccatcttcaaccaggccctgactcaaaccgggcgcctgtcaagcaccgaacctaatctccagaacatcccaattcgtctggaagaaggccgcaaaattcgccaagcatttgtgccatcggaacctgactgggttatctttagcgcagattactcacagattgagctccgtgttctcgcacacattgcaaacgatgaaaatctgatcgatgcttttcgtcatgaccttgacatccatacgaagacagccatggatattttccatgtaacagcagatgaagttacccccaatatgcgtcgccaagcaaaagccgtgaacttcggtattgtctatgggatctctgattacggtctgagtcagaaccttgggatcccacgcaaagaagccgccgaatttattcgtcgttatttcgaaagctttcccggcgttaaacagtacatggagaatattgtacaggaagccaaacagaaaggatacgtcaccacccttttacaccgccgccgctatctgccagacatccactctcgtaatttcaacttacgttcattcgcagaacgcacggccatgaacaccccaattcaaggatcagccgccgacatcatcaagaaggcaatgattgatttagctgatcgtctgaaacgcgagaaacttcaagctcgtatgctgctccaggttcatgacgaactgattcttgaagctcctcgtgaggaagtcgaacgcctgcagcagattgtacccgaggtcatggagaacgccatccagttaaccgtcccactgaaagttgattatcactacggtcctacgtggtacgacgctaag

SEQ ID NO: 210 - protein, 604 aa, synthetic construct
  REGION 1..604: note = Variant of DNA polymerase
MHHHHHHGGSGMVAPQTKKEEAVLPNINYTIVEEVTEPILADRSALVVEVLESNYHKAPILGFALANEHGNFFIRTDTALSSPLFTAWLEDESKKKSVFDGKRAIVALKWKGIELRGIEFDLLIASYLLNPSQSTEDVASVAKTKQYMAVQSDEAVYGKGAKQTVPDENVLAEHLVRKAAAIRALEKELIHDLQENEQYALFTDLELPLSSILAEMEFTGVKVDVERLKEMGEELTEQLRQVEQEIYKLAGQRFNINSPKQLGVILFEKLQLPVLKKTKTGYSTSADVLEKLAPQHEIVEKILHYRQLGKLQSTYIEGLLKVVHRDTHKVHTIFNQALTQTGRLSSTEPNLQNIPIRLEEGRKIRQAFVPSEPDWVIFSADYSQIELRVLAHIANDENLIDAFRHDLDIHTKTAMDIFHVTADEVTPNMRRQAKAVNFGIVYGISDYGLSQNLGIPRKEAAEFIRRYFESFPGVKQYMENIVQEAKQKGYVTTLLHRRRYLPDIHSRNFNLRSFAERTAMNTPIQGSAADIIKKAMIDLADRLKREKLQARMLLQVHDELILEAPREEVERLQQIVPEVMENAIQLTVPLKVDYHYGPTWYDAK

SEQ ID NO: 211 - DNA, 1812 bp, synthetic construct
  misc_feature 1..1812: note = Variant of DNA polymerase
  source 1..1812: mol_type = other DNA
atgcatcaccatcaccatcacggtggcagcggtatggttgcaccacagaccaaaaaagaaatggccgtactgccgaacatcaattatacaattgtggaggaagtcaccgaaccgattctcgcggatcgttcggcgttagtggttgaggttctggaatccaactaccataaggctccgatcctgggctttgccctggccaatgaacacggtaacttcttcattcgcactgacacggctctttcttctccgctgtttaccgcgtggctggaggatgagagcaagaagaaatcagtattcgacggtaaacgcgcaatcgtggccctgaaatggaaaggcattgaattacgtggcatcgaatttgacttgttgatcgcttcatatctcctgaatccctcgcaaagcacggaagatgtcgcaagcgtggccaagaccaaacagtacatggcagtacagagtgatgaagcagtctatggaaaaggtgcgaaacaaacggtgccagatgaaaacgttttagccgaacatctggtgcgtaaagctgctgcaattcgcgccctggagaaagaactgatccacgatttgcaggaaaatgaacaatacgccctgtttactgaccttgaattacctctgtcctcgattctggcagagatggaatttaccggtgtgaaagtagatgttgaacgcctgaaagaaatgggcgaggagctcacagaacaactgcgccaagtggagcaggaaatctataagttagctggccaacgcttcaacattaacagccctaaacaactgggtgtcattctgtttgaaaaattacagcttcccgtcctgaagaagacgaagaccggctatagtacgagtgctgatgtgctcgagaaacttgccccgcaacatgaaatcgtcgagaaaattcttcactaccgtcagctcggtaaactgcaatccacatatattgaagggctgctgaaagttgtacatcgcgacacccataaagtccacaccatcttcaaccaggccctgactcaaaccgggcgcctgtcaagcaccgaacctaatctccagaacatcccaattcgtctggaagaaggccgcaaaattcgccaagcatttgtgccatcggaacctgactgggttatctttagcgcagattactcacagattgagctccgtgttctcgcacacattgcaaacgatgaaaatctgatcgatgcttttcgtcatgaccttgacatccatacgaagacagccatggatattttccatgtaacagcagatgaagttacccccaatatgcgtcgccaagcaaaagccgtgaacttcggtattgtctatgggatctctgattacggtctgagtcagaaccttgggatcccacgcaaagaagccgccgaatttattcgtcgttatttcgaaagctttcccggcgttaaacagtacatggagaatattgtacaggaagccaaacagaaaggatacgtcaccacccttttacaccgccgccgctatctgccagacatccactctcgtaatttcaacttacgttcattcgcagaacgcacggccatgaacaccccaattcaaggatcagccgccgacatcatcaagaaggcaatgattgatttagctgatcgtctgaaaaaagagaaacttcaagctcgtatgctgctccaggttcatgacgaactgattcttgaagctcctcgtgaggaagtcgaacgcctgcagcagattgtacccgaggtcatggagaacgccatccagttaaccgtcccactgaaagttgattatcactacggtcctacgtggtacgacgctaag

SEQ ID NO: 212 - protein, 604 aa, synthetic construct
  REGION 1..604: note = Variant of DNA polymerase
MHHHHHHGGSGMVAPQTKKEMAVLPNINYTIVEEVTEPILADRSALVVEVLESNYHKAPILGFALANEHGNFFIRTDTALSSPLFTAWLEDESKKKSVFDGKRAIVALKWKGIELRGIEFDLLIASYLLNPSQSTEDVASVAKTKQYMAVQSDEAVYGKGAKQTVPDENVLAEHLVRKAAAIRALEKELIHDLQENEQYALFTDLELPLSSILAEMEFTGVKVDVERLKEMGEELTEQLRQVEQEIYKLAGQRFNINSPKQLGVILFEKLQLPVLKKTKTGYSTSADVLEKLAPQHEIVEKILHYRQLGKLQSTYIEGLLKVVHRDTHKVHTIFNQALTQTGRLSSTEPNLQNIPIRLEEGRKIRQAFVPSEPDWVIFSADYSQIELRVLAHIANDENLIDAFRHDLDIHTKTAMDIFHVTADEVTPNMRRQAKAVNFGIVYGISDYGLSQNLGIPRKEAAEFIRRYFESFPGVKQYMENIVQEAKQKGYVTTLLHRRRYLPDIHSRNFNLRSFAERTAMNTPIQGSAADIIKKAMIDLADRLKKEKLQARMLLQVHDELILEAPREEVERLQQIVPEVMENAIQLTVPLKVDYHYGPTWYDAK

SEQ ID NO: 213 - DNA, 1812 bp, synthetic construct
  misc_feature 1..1812: note = Variant of DNA polymerase
  source 1..1812: mol_type = other DNA
atgcatcaccatcaccatcacggtggcagcggtatggttgcaccacagaccaaaaaagaagaggccgtactgccgaacatcaattatacaattgtggaggaagtcaccgaaccgattctcgcggatcgttcggcgttagtggttgaggttctggaatccaactaccataaggctccgatcctgggctttgccctggccaatgaacacggtaacttcttcattcgcactgacacggctctttcttctccgctgtttaccgcgtggctggaggatgagagcaagaagaaatcagtattcgacggtaaacgcgcaatcgtggccctgaaatggaaaggcattgaattacgtggcatcgaatttgacttgttgatcgcttcatatctcctgaatccctcgcaaagcacggaagatgtcgcaagcgtggccaagaccaaacagtacatggcagtacagcgcgatgaagcagtctatggaaaaggtgcgaaacaaacggtgccagatgaaaacgttttagccgaacatctggtgcgtaaagctgctgcaattcgcgccctggagaaagaactgatccacgatttgcaggaaaatgaacaatacgccctgtttactgaccttgaattacctctgtcctcgattctggcagagatggaatttaccggtgtgaaagtagatgttgaacgcctgaaagaaatgggcgaggagctcacagaacaactgcgccaagtggagcaggaaatctataagttagctggccaacgcttcaacattaacagccctaaacaactgggtgtcattctgtttgaaaaattacagcttcccgtcctgaagaagacgaagaccggctatagtacgagtgctcgcgtgctcgagaaacttgccccgcagcatgaaatcgtcgagaaaattcttcactaccgtcagctcggtaaactgcaatccacatatattgaagggctgctgaaagttgtacatcgcgacacccataaagtccacaccatcttcaaccaggccctgactcaaaccgggcgcctgtcaagcaccgaacctaatctccagaacatcccaattcgtctggaagaaggccgcaaaattcgccaagcatttgtgccatcggaacctgactgggttatctttagcgcagattactcacagattgagctccgtgttctcgcacacattgcaaacgatgaaaatctgatcgatgcttttcgtcatgaccttgacatccatacgaagacagccatggatattttccatgtaacagcagatgaagttacccccaatatgcgtcgccaagcaaaagccgtgaacttcggtattgtctatgggatctctgattacggtctgagtcagaaccttaatatccctcgcaaagaagccgccgaatttattcgtcgttatttcgaaagctttcccggcgttaaacagtacatggagaatattgtacaggaagccaaacagaaaggatacgtcaccacccttttacaccgccgccgctatctgccagacatccactctcgtaatttcaacttacgttcattcgcagaacgcacggccatgaacaccccaattcaaggatcagccgccgacatcatcaagaaggcaatgattgatttagctgatcgtctgaaacgcgagaaacttcaagctcgtatgctgctccaggttcatgacgaactgattcttgaagctcctcgtgaggaagtcgaacgcctgcagcagattgtacccgaggtcatggagaacgccatccagttaaccgtcccactgaaagttgattatcactacggtcctacgtggtacgacgctaag

SEQ ID NO: 214 - protein, 604 aa, synthetic construct
  REGION 1..604: note = Variant of DNA polymerase
MHHHHHHGGSGMVAPQTKKEEAVLPNINYTIVEEVTEPILADRSALVVEVLESNYHKAPILGFALANEHGNFFIRTDTALSSPLFTAWLEDESKKKSVFDGKRAIVALKWKGIELRGIEFDLLIASYLLNPSQSTEDVASVAKTKQYMAVQRDEAVYGKGAKQTVPDENVLAEHLVRKAAAIRALEKELIHDLQENEQYALFTDLELPLSSILAEMEFTGVKVDVERLKEMGEELTEQLRQVEQEIYKLAGQRFNINSPKQLGVILFEKLQLPVLKKTKTGYSTSARVLEKLAPQHEIVEKILHYRQLGKLQSTYIEGLLKVVHRDTHKVHTIFNQALTQTGRLSSTEPNLQNIPIRLEEGRKIRQAFVPSEPDWVIFSADYSQIELRVLAHIANDENLIDAFRHDLDIHTKTAMDIFHVTADEVTPNMRRQAKAVNFGIVYGISDYGLSQNLNIPRKEAAEFIRRYFESFPGVKQYMENIVQEAKQKGYVTTLLHRRRYLPDIHSRNFNLRSFAERTAMNTPIQGSAADIIKKAMIDLADRLKREKLQARMLLQVHDELILEAPREEVERLQQIVPEVMENAIQLTVPLKVDYHYGPTWYDAK

SEQ ID NO: 215 - DNA, 1812 bp, synthetic construct
  misc_feature 1..1812: note = Variant of DNA polymerase
  source 1..1812: mol_type = other DNA
atgcatcaccatcaccatcacggtggcagcggtatggttgcaccacagaccaaaaaagaagaggccgtactgccgaacatcaattatacaattgtggaggaagtcaccgaaccgattctcgcggatcgttcggcgttagtggttgaggttctggaatccaactaccataaggctccgatcctgggctttgccctggccaatgaacacggtaacttcttcattcgcactgacacggctctttcttctccgctgtttaccgcgtggctggaggatgagagcaagaagaaatcagtattcgacggtaaacgcgcaatcgtggccctgaaatggaaaggcattgaattacgtggcatcgaatttgacttgttgatcgcttcatatctcctgaatccctcgcaaagcacggaagatgtcgcaagcgtggccaagaccaaacagtacatggcagtacagagcgatgaagcagtctatggaaaaggtgcgaaacaaacggtgccagatgaaaacgttttagccgaacatctggtgcgtaaagctgctgcaattcgcgccctggagaaagaactgatccacgatttgcaggaaaatgaacaatacgccctgtttactgaccttgaattacctctgtcctcgattctggcagagatggaatttaccggtgtgaaagtagatgttgaacgcctgaaagaaatgggcgaggagctcacagaacaactgcgccaagtggagcaggaaatctataagttagctggccaagagttcaacattaacagccctaaacaactgggtgtcattctgtttgaaaaattacagcttcccgtcctgaagaagacgaagaccggctatagtacgagtgctgatgtgctcgagaaacttgccccgcagcatgaaatcgtcgagaaaattcttcattaccgtcagctcggtaaactgcaatccacatatattgaagggctgctgaaagttgtacatcgcgacacccataaagtccacaccatcttcaaccaggccctgactcaaaccgggcgcctgtcaagcaccgaacctaatctccagaacatcccaattcgtctggaagaaggccgcaaaattcgccaagcatttgtgccatcggaacctgactgggttatctttagcgcagattactcacagattgagctccgtgttctcgcacacattgcaaacgatgaaaatctgatcgatgcttttcgtcatgaccttgacatccatacgaagacagccatggatattttccatgtaacagcagatgaagttacccccaatatgcgtcgccaagcaaaagccgtgaacttcggtattgtctatgggatctctgattacggtctgagtcagaaccttaacatcccacgcaaagaagccgccgaatttattcgtcgttatttcgaaagctttcccggcgttaaacagtacatggagaatattgtacaggaagccaaacagaaaggatacgtcaccacccttttacaccgccgccgctatctgccagacatccactctcgtaatttcaacttacgttcattcgcagaacgcacggccatgaacaccccaattcaaggatcagccgccgacatcatcaagaaggcaatgattgatttagctcgtcgtctgaaacgcgagaaacttcaagctcgtatgctgctccaggttcatgacgaactgattcttgaagctcctcgtgaggaagtcgaacgcctgcagcagattgtacccgaggtcatggagaacgccgtccagttaaccgtcccactgaaagttgattatcactacggtcctacgtggtacgacgctaag

SEQ ID NO: 216 - protein, 604 aa, synthetic construct
  REGION 1..604: note = Variant of DNA polymerase
MHHHHHHGGSGMVAPQTKKEEAVLPNINYTIVEEVTEPILADRSALVVEVLESNYHKAPILGFALANEHGNFFIRTDTALSSPLFTAWLEDESKKKSVFDGKRAIVALKWKGIELRGIEFDLLIASYLLNPSQSTEDVASVAKTKQYMAVQSDEAVYGKGAKQTVPDENVLAEHLVRKAAAIRALEKELIHDLQENEQYALFTDLELPLSSILAEMEFTGVKVDVERLKEMGEELTEQLRQVEQEIYKLAGQEFNINSPKQLGVILFEKLQLPVLKKTKTGYSTSADVLEKLAPQHEIVEKILHYRQLGKLQSTYIEGLLKVVHRDTHKVHTIFNQALTQTGRLSSTEPNLQNIPIRLEEGRKIRQAFVPSEPDWVIFSADYSQIELRVLAHIANDENLIDAFRHDLDIHTKTAMDIFHVTADEVTPNMRRQAKAVNFGIVYGISDYGLSQNLNIPRKEAAEFIRRYFESFPGVKQYMENIVQEAKQKGYVTTLLHRRRYLPDIHSRNFNLRSFAERTAMNTPIQGSAADIIKKAMIDLARRLKREKLQARMLLQVHDELILEAPREEVERLQQIVPEVMENAVQLTVPLKVDYHYGPTWYDAK

SEQ ID NO: 217 - DNA, 1812 bp, synthetic construct
  misc_feature 1..1812: note = Variant of DNA polymerase
  source 1..1812: mol_type = other DNA
atgcatcaccatcaccatcacggtggcagcggtatggttgcaccacagaccaaaaaagaagaggccgtactgccgaacatcaattatacaattgtggaggaagtcaccgaaccgattctcgcggatcgttcggcgttagtggttgaggttctggaatccaactaccataaggctccgatcctgggctttgccctggccaatgaacacggtaacttcttcattcgcactgacacggctctttcttctccgctgtttaccgcgtggctggaggatgagagcaagaagaaatcagtattcgacggtaaacgcgcaatcgtggccctgaaatggaaaggcattgaattacgtggcatcgaatttgacttgttgatcgcttcatatctcctgaatccctcgcaaagcacggaagatgtcgcaagcgtggccaagaccaaacagtacatggcagtacagcgcgatgaagcagtctatggaaaaggtgcgaaacaaacggtgccagatgaaaacgttttagccgaacatctggtgcgtaaagctgctgcaattcgcgccctggagaaagaactgatccacgatttgcaggaaaatgaacaatacgccctgtttactgaccttgaattacctctgtcctcgattctggcagagatggaatttaccggtgtgaaagtagatgttgaacgcctgaaagaaatgggcgaggagctcacagaacaactgcgccaagtggagcaggaaatctataagttagctggccaacgcttcaacattaacagccctaaacaactgggtgtcattctgtttgaaaaattacagcttcccgtcctgaagaagacgaagaccggctatagtacgagtgctgatgtgctcgagaaacttgccccgcagcatgaaatcgtcgagaaaattcttcactaccgtcagctcggtaaactgcaatccacatatattgaagggctgctgaaagttgtacatcgcgacacccataaagtccacaccatcttcaaccaggccctgactcaaaccgggcgcctgtcaagcaccgaacctaatctccagaacatcccaattcgtctggaagaaggccgcaaaattcgccaagcatttgtgccatcggaacctgactgggttatctttagcgcagattactcacagattgagctccgtgttctcgcacacattgcaaacgatgaaaatctgatcgatgcttttcgtcatgaccttgacatccatacgaagacagccatggatattttccatgtaacagcagatgaagttacccccaatatgcgtcgccaagcaaaagccgtgaacttcggtattgtctatgggatctctgattacggtctgagtcagaaccttgggatcccacgcaaagaagccgccgaatttattcgtcgttatttcgaaagctttcccggcgttaaacagtacatggagaatattgtacaggaagccaaacagaaaggatacgtcaccacccttttacaccgccgccgctatctgccagacatcacctctcgtaatttcaacttacgttcattcgcagaacgcacggccatgaacaccccaattcaaggatcagccgccgacatcatcaagaaggcaatgattgatttagctgatcgtctgaaacgcgagaaacttcaagctcgtatgctgctccaggttcatgacgaactgattcttgaagctcctcgtgaggaagtcgaacgcctgcagcagattgtacccgaggtcatggagaacgccgtccagttaaccgtcccactgaaagttgattatcactacggtcctacgtggtacgacgctaag

SEQ ID NO: 218 - protein, 604 aa, synthetic construct
  REGION 1..604: note = Variant of DNA polymerase
MHHHHHHGGSGMVAPQTKKEEAVLPNINYTIVEEVTEPILADRSALVVEVLESNYHKAPILGFALANEHGNFFIRTDTALSSPLFTAWLEDESKKKSVFDGKRAIVALKWKGIELRGIEFDLLIASYLLNPSQSTEDVASVAKTKQYMAVQRDEAVYGKGAKQTVPDENVLAEHLVRKAAAIRALEKELIHDLQENEQYALFTDLELPLSSILAEMEFTGVKVDVERLKEMGEELTEQLRQVEQEIYKLAGQRFNINSPKQLGVILFEKLQLPVLKKTKTGYSTSADVLEKLAPQHEIVEKILHYRQLGKLQSTYIEGLLKVVHRDTHKVHTIFNQALTQTGRLSSTEPNLQNIPIRLEEGRKIRQAFVPSEPDWVIFSADYSQIELRVLAHIANDENLIDAFRHDLDIHTKTAMDIFHVTADEVTPNMRRQAKAVNFGIVYGISDYGLSQNLGIPRKEAAEFIRRYFESFPGVKQYMENIVQEAKQKGYVTTLLHRRRYLPDITSRNFNLRSFAERTAMNTPIQGSAADIIKKAMIDLADRLKREKLQARMLLQVHDELILEAPREEVERLQQIVPEVMENAVQLTVPLKVDYHYGPTWYDAK

SEQ ID NO: 219 - DNA, 1812 bp, synthetic construct
  misc_feature 1..1812: note = Variant of DNA polymerase
  source 1..1812: mol_type = other DNA
atgcatcaccatcaccatcacggtggcagcggtatggttgcaccacagaccaaaaaagaagaggccgtactgccgaacatcaattatacaattgtggaggaagtcaccgaaccgattctcgcggatcgttcggcgttagtggttgaggttctggggtccaactaccataaggctccgatcctgggctttgccctggccaatgaacacggtaacttcttcattcgcactgacacggctctttcttctccgctgtttaccgcgtggctggaggatgagagcaagaagaaatcagtattcgacgctaaacgcgcaatcgtggccctgaaatggaaaggcattgaattacgtggcatcgaatttgacttgttgctggcttcatatctcctgaatccctcgcaaagcacggaagatgtcgcaagcgtggccaagaccaaacagtacatggcagtacagagcgatgaagcagtctatggaaaaggtgcgaaacaaacggtgccagatgaaaacgttttagccgaacatctggtgcgtaaagctgctgcaattcgcgccctggagaaagaactgatccacgatttgcaggaaaatgaacaatacgccctgtttactgaccttgaattacctctgtcctcggtcctggcagagatggaatttaccggtgtgaaagtagatgttgaacgcctgaaagaaatgggcgaggagctcacagaacaactgcgccaagtggagcaggaaatctataagttagctggccaagagttcaacattaacagccctaaacaactgggtgtcattctgtttgaaaaattacagcttcccgtcctgaagaagacgaagaccggctatagtacgagtgctgatgtgctcgagaaacttgcccgtcagcatgaaatcgtccgcaaaattcttcactaccgtcagctcggtaaactgcaatccacatatattgaagggctgctgaaagttgtacatcgcgacacccataaagtccacaccatcttcaaccaggccctgactcaaaccgggcgcctgtcaagcaccgaacctaatctccagaacatcccaattcgtctggaagaaggccgcaaaattcgccaagcatttgtgccatcgaaacctgactgggttatctttagcgcagattactcacagattgagctccgtgttctcgcacacctggcaaacgatgaaaatctgatcgatgcttttcgtcatgaccttgacatccatacgaagacagccatggatattttccatgtaacagcagatgaagttacccccaatatgcgtcgccaagcaaaagccgtgaacttcggtattgtctatgggatctctgattacggtctgagtcagcgtcttggcatcacgcgcaaagaagccgccgaatttattcgtcgttatttcgaaagctttcccggcgttaaacagtacatggagaatattgtaaaagaagccaaacagaaaggatacgtcaccacccttttacaccgccgccgctatctgccagacatcacctctcgtaatcgtaacttacgttcattcgcagaacgcacggccatgaacaccccaattcaaggatcagccgccgacatcatcaagaaggcaatgattgatttagctcgtcgtctgaaacgcgagaaacttcaagctcgtatgctgctccaggttcatgacgaactgattcttgaagctcctcgtgaggaagtcgaacgcctgcagcagattgtacccgaggtcatggagaacgccgtccagttaaccgtcccactgaaagttgattatcactacggtcctacgtggtacgacgctaag

SEQ ID NO: 220 - protein, 604 aa, synthetic construct
  REGION 1..604: note = Variant of DNA polymerase
MHHHHHHGGSGMVAPQTKKEEAVLPNINYTIVEEVTEPILADRSALVVEVLGSNYHKAPILGFALANEHGNFFIRTDTALSSPLFTAWLEDESKKKSVFDAKRAIVALKWKGIELRGIEFDLLLASYLLNPSQSTEDVASVAKTKQYMAVQSDEAVYGKGAKQTVPDENVLAEHLVRKAAAIRALEKELIHDLQENEQYALFTDLELPLSSVLAEMEFTGVKVDVERLKEMGEELTEQLRQVEQEIYKLAGQEFNINSPKQLGVILFEKLQLPVLKKTKTGYSTSADVLEKLARQHEIVRKILHYRQLGKLQSTYIEGLLKVVHRDTHKVHTIFNQALTQTGRLSSTEPNLQNIPIRLEEGRKIRQAFVPSKPDWVIFSADYSQIELRVLAHLANDENLIDAFRHDLDIHTKTAMDIFHVTADEVTPNMRRQAKAVNFGIVYGISDYGLSQRLGITRKEAAEFIRRYFESFPGVKQYMENIVKEAKQKGYVTTLLHRRRYLPDITSRNRNLRSFAERTAMNTPIQGSAADIIKKAMIDLARRLKREKLQARMLLQVHDELILEAPREEVERLQQIVPEVMENAVQLTVPLKVDYHYGPTWYDAK

SEQ ID NO: 221 - DNA, 1812 bp, synthetic construct
  misc_feature 1..1812: note = Variant of DNA polymerase
  source 1..1812: mol_type = other DNA
atgcatcaccatcaccatcacggtggcagcggtatggttgcaccacagaccaaaaaagaaatggccgtactgccgaacatcaattatacaattgtggaggaagtcaccgaaccgattctcgcggatcgttcggcgttagtggttgaggttctggggtccaactaccataaggctccgatcctgggctttgccctggccaatgaacacggtaacttcttcattcgcactgacacggctctttcttctccgctgtttaccgcgtggctggaggatgagagcaagaagaaatcagtattcgacgctaaacgcgcaatcgtggccctgaaatggaaaggcattgaattacgtggcatcgaatttgacttgttgctggcttcatatctcctgaatccctcgcaaagcacggaagatgtcgcaagcgtggccaagaccaaacagtacatggcagtacagagtgatgaggcagtctatggaaaaggtgcgaaacaaacggtgccagatgaaaacgttttagccgaacatctggtgcgtaaagctgctgcaattcgcgccctggagaaagaactgatccacgatttgcaggaaaatgaacaatacgccctgtttactgaccttgaattacctctgtcctcggtcctggcagagatggaatttaccggtgtgaaagtagatgttgaacgcctgaaagaaatgggcgaggagctcacagaacaactgcgccaagtggagcaggaaatctataagttagctggccaagagttcaacattaacagccctaaacaactgggtgtcattctgtttgaaaaattacagcttcccgtcctgaagaagacgaagaccggctatagtacgagtgctgatgtgctcgagaaacttgcccgtcagcatgaaatcgtccgcaaaattcttcactaccgtcagctcggtaaactgcaatccacatatattgaagggctgctgaaagttgtacatcgcgacacccataaagtccacaccatcttcaaccaggccctgactcaaaccgggcgcctgtcaagcaccgaacctaatctccagaacatcccaattcgtctggaagaaggccgcaaaattcgccaagcatttgtgccatcgaaacctgactgggttatctttagcgcagattactcacagattgagctccgtgttctcgcacacctggcaaacgatgaaaatctgatcgatgcttttcgtcatgaccttgacatccatacgaagacagccatggatattttccatgtaacagcagatgaagttacccccaatatgcgtcgccaagcaaaagccgtgaacttcggtattgtctatgggatctctgattacggtctgagtcagcgtcttggcatcccgcgcaaagaagccgccgaatttattcgtcgttatttcgaaagctttcccggcgttaaacagtacatggagaatattgtaaaagaagccaaacagaaaggatacgtcaccacccttttacaccgccgccgctatctgccagacatcacctctcgtaatcgcaacttacgttcattcgcagaacgcacggccatgaacaccccaattcaaggatcagccgccgacatcatcaagaaggcaatgattgatttagctgatcgtctgaaaaaagagaaacttcaagctcgtatgctgctccaggttcatgacgaactgattcttgaagctcctcgtgaggaagtcgaacgcctgcagcagattgtacccgaggtcatggagaacgccgtccagttaaccgtcccactgaaagttgattatcactacggtcctacgtggtacgacgctaag

SEQ ID NO: 222 - protein, 604 aa, synthetic construct
  REGION 1..604: note = Variant of DNA polymerase
MHHHHHHGGSGMVAPQTKKEMAVLPNINYTIVEEVTEPILADRSALVVEVLGSNYHKAPILGFALANEHGNFFIRTDTALSSPLFTAWLEDESKKKSVFDAKRAIVALKWKGIELRGIEFDLLLASYLLNPSQSTEDVASVAKTKQYMAVQSDEAVYGKGAKQTVPDENVLAEHLVRKAAAIRALEKELIHDLQENEQYALFTDLELPLSSVLAEMEFTGVKVDVERLKEMGEELTEQLRQVEQEIYKLAGQEFNINSPKQLGVILFEKLQLPVLKKTKTGYSTSADVLEKLARQHEIVRKILHYRQLGKLQSTYIEGLLKVVHRDTHKVHTIFNQALTQTGRLSSTEPNLQNIPIRLEEGRKIRQAFVPSKPDWVIFSADYSQIELRVLAHLANDENLIDAFRHDLDIHTKTAMDIFHVTADEVTPNMRRQAKAVNFGIVYGISDYGLSQRLGIPRKEAAEFIRRYFESFPGVKQYMENIVKEAKQKGYVTTLLHRRRYLPDITSRNRNLRSFAERTAMNTPIQGSAADIIKKAMIDLADRLKKEKLQARMLLQVHDELILEAPREEVERLQQIVPEVMENAVQLTVPLKVDYHYGPTWYDAK

SEQ ID NO: 223 - DNA, 1812 bp, synthetic construct
  misc_feature 1..1812: note = Variant of DNA polymerase
  source 1..1812: mol_type = other DNA
atgcatcaccatcaccatcacggtggcagcggtatggttgcaccacagaccaaaaaagaagaggccgtactgccgaacatcaattatacaattgtggaggaagtcaccgaaccgattctcgcggatcgttcggcgttagtggttgaggttctggggtccaactaccataaggctccgatcctgggctttgccctggccaatgaacacggtaacttcttcattcgcactgacacggctctttcttctccgctgtttaccgcgtggctggaggatgagagcaagaagaaatcagtattcgacgctaaacgcgcaatcgtggccctgaaatggaaaggcattgaattacgtggcatcgaatttgacttgttgctggcttcatatctcctgaatccctcgcaaagcacggaagatgtcgcaagcgtggccaagaccaaacagtacatggcagtacagagcgatgaagcagtctatggaaaaggtgcgaaacaaacggtgccagatgaaaacgttttagccgaacatctggtgcgtaaagctgctgcaattcgcgccctggagaaagaactgatccacgatttgcaggaaaatgaacaatacgccctgtttactgaccttgaattacctctgtcctcggtcctggcagagatggaatttaccggtgtgaaagtagatgttgaacgcctgaaagaaatgggcgaggagctcacagaacaactgcgccaagtggagcaggaaatctataagttagctggccaacgcttcaacattaacagccctaaacaactgggtgtcattctgtttgaaaaattacagcttcccgtcctgaagaagacgaagaccggctatagtacgagtgctgatgtgctcgagaaacttgcccgtcagcatgaaatcgtccgcaaaattcttcactaccgtcagctcggtaaactgcaatccacatatattgaagggctgctgaaagttgtacatcgcgacacccataaagtccacaccatcttcaaccaggccctgactcaaaccgggcgcctgtcaagcaccgaacctaatctccagaacatcccaattcgtctggaagaaggccgcaaaattcgccaagcatttgtgccatcgaaacctgactgggttatctttagcgcagattactcacagattgagctccgtgttctcgcacacctggcaaacgatgaaaatctgatcgatgcttttcgtcatgaccttgacatccatacgaagacagccatggatattttccatgtaacagcagatgaagttacccccaatatgcgtcgccaagcaaaagccgtgaacttcggtattgtctatgggatctctgattacggtctgagtcagcgtcttggcatcacgcgcaaagaagccgccgaatttattcgtcgttatttcgaaagctttcccggcgttaaacagtacatggagaatattgtaaaagaagccaaacagaaaggatacgtcaccacccttttacaccgccgccgctatctgccagacatcacctctcgtaatcgcaacttacgttcattcgcagaacgcacggccatgaacaccccaattcaaggatcagccgccgacatcatcaagaaggcaatgattgatttagctgatcgtctgaaacgcgagaaacttcaagctcgtatgctgctccaggttcatgacgaactgattcttgaagctcctcgtgaggaagtcgaacgcctgcagcagattgtacccgaggtcatggagaacgccgtccagttaaccgtcccactgaaagttgattatcactacggtcctacgtggtacgacgctaag

SEQ ID NO: 224 - protein, 604 aa, synthetic construct
  REGION 1..604: note = Variant of DNA polymerase
MHHHHHHGGSGMVAPQTKKEEAVLPNINYTIVEEVTEPILADRSALVVEVLGSNYHKAPILGFALANEHGNFFIRTDTALSSPLFTAWLEDESKKKSVFDAKRAIVALKWKGIELRGIEFDLLLASYLLNPSQSTEDVASVAKTKQYMAVQSDEAVYGKGAKQTVPDENVLAEHLVRKAAAIRALEKELIHDLQENEQYALFTDLELPLSSVLAEMEFTGVKVDVERLKEMGEELTEQLRQVEQEIYKLAGQRFNINSPKQLGVILFEKLQLPVLKKTKTGYSTSADVLEKLARQHEIVRKILHYRQLGKLQSTYIEGLLKVVHRDTHKVHTIFNQALTQTGRLSSTEPNLQNIPIRLEEGRKIRQAFVPSKPDWVIFSADYSQIELRVLAHLANDENLIDAFRHDLDIHTKTAMDIFHVTADEVTPNMRRQAKAVNFGIVYGISDYGLSQRLGITRKEAAEFIRRYFESFPGVKQYMENIVKEAKQKGYVTTLLHRRRYLPDITSRNRNLRSFAERTAMNTPIQGSAADIIKKAMIDLADRLKREKLQARMLLQVHDELILEAPREEVERLQQIVPEVMENAVQLTVPLKVDYHYGPTWYDAK

SEQ ID NO: 225 - DNA, 1812 bp, synthetic construct
  misc_feature 1..1812: note = Variant of DNA polymerase
  source 1..1812: mol_type = other DNA
atgcatcaccatcaccatcacggtggcagcggtatggttgcaccacagaccaaaaaagaagaggccgtactgccgaacatcaattatacaattgtggaggaagtcaccgaaccgattctcgcggatcgttcggcgttagtggttgaggttctggggtccaactaccataaggctccgatcctgggctttgccctggccaatgaacacggtaacttcttcattcgcactgacacggctctttcttctccgctgtttaccgcgtggctggaggatgagagcaagaagaaatcagtattcgacgctaaacgcgcaatcgtggccctgaaatggaaaggcattgaattacgtggcatcgaatttgacttgttgctggcttcatatctcctgaatccctcgcaaagcacggaagatgtcgcaagcgtggccaagaccaaacagtacatggcagtacagagtgattgggcagtctatggaaaaggtgcgaaacaaacggtgccagatgaaaacgttttagccgaacatctggtgcgtaaagctgctgcaattcgcgccctggagaaagaactgatccacgatttgcaggaaaatgaacaatacgccctgtttactgaccttgaattacctctgtcctcggtcctggcagagatggaatttaccggtgtgaaagtagatgttgaacgcctgaaagaaatgggcgaggagctcacagaacaactgcgccaagtggagcaggaaatctataagttagctggccaacgcttcaacattaacagccctaaacaactgggtgtcattctgtttgaaaaattacagcttcccgtcctgaagaagacgaagaccggctatagtacgagtgctgatgtgctcgagaaacttgcccgtcagcatgaaatcgtccgcaaaattcttcactaccgtcagctcggtaaactgcaatccacatatattgaagggctgctgaaagttgtacatcgcgacacccataaagtccacaccatcttcaaccaggccctgactcaaaccgggcgcctgtcaagcaccgaacctaatctccagaacatcccaattcgtctggaagaaggccgcaaaattcgccaagcatttgtgccatcgaaacctgactgggttatctttagcgcagattactcacagattgagctccgtgttctcgcacacctggcaaacgatgaaaatctgatcgatgcttttcgtcatgaccttgacatccatacgaagacagccatggatattttccatgtaacagcagatgaagttacccccaatatgcgtcgccaagcaaaagccgtgaacttcggtattgtctatgggatctctgattacggtctgagtcagcgtcttggcatcacgcgcaaagaagccgccgaatttattcgtcgttatttcgaaagctttcccggcgttaaacagtacatggagaatattgtaaaagaagccaaacagaaaggatacgtcaccacccttttacaccgccgccgctatctgccagacatccattctcgtaatcgcaacttacgttcattcgcagaacgcacggccatgaacaccccaattcaaggatcagccgccgacatcatcaagaaggcaatgattgatttagctgatcgtctgaaacgcgagaaacttcaagctcgtatgctgctccaggttcatgacgaactgattcttgaagctcctcgtgaggaagtcgaacgcctggttcagattgtacccgaggtcatggagaacgccatccagttaaccgtcccactgaaagttgattatcactacggtcctacgtggtacgacgctaag

SEQ ID NO: 226 - protein, 604 aa, synthetic construct
  REGION 1..604: note = Variant of DNA polymerase
MHHHHHHGGSGMVAPQTKKEEAVLPNINYTIVEEVTEPILADRSALVVEVLGSNYHKAPILGFALANEHGNFFIRTDTALSSPLFTAWLEDESKKKSVFDAKRAIVALKWKGIELRGIEFDLLLASYLLNPSQSTEDVASVAKTKQYMAVQSDWAVYGKGAKQTVPDENVLAEHLVRKAAAIRALEKELIHDLQENEQYALFTDLELPLSSVLAEMEFTGVKVDVERLKEMGEELTEQLRQVEQEIYKLAGQRFNINSPKQLGVILFEKLQLPVLKKTKTGYSTSADVLEKLARQHEIVRKILHYRQLGKLQSTYIEGLLKVVHRDTHKVHTIFNQALTQTGRLSSTEPNLQNIPIRLEEGRKIRQAFVPSKPDWVIFSADYSQIELRVLAHLANDENLIDAFRHDLDIHTKTAMDIFHVTADEVTPNMRRQAKAVNFGIVYGISDYGLSQRLGITRKEAAEFIRRYFESFPGVKQYMENIVKEAKQKGYVTTLLHRRRYLPDIHSRNRNLRSFAERTAMNTPIQGSAADIIKKAMIDLADRLKREKLQARMLLQVHDELILEAPREEVERLVQIVPEVMENAIQLTVPLKVDYHYGPTWYDAK

SEQ ID NO: 227 - DNA, 1812 bp, synthetic construct
  misc_feature 1..1812: note = Variant of DNA polymerase
  source 1..1812: mol_type = other DNA
atgcatcaccatcaccatcacggtggcagcggtatggttgcaccacagaccaaaaaagaaatggccgtactgccgaacatcaattatacaattgtggaggaagtcaccgaaccgattctcgcggatcgttcggcgttagtggttgaggttctggggtccaactaccataaggctccgatcctgggctttgccctggccaatgaacacggtaacttcttcattcgcactgacacggctctttcttctccgctgtttaccgcgtggctggaggatgagagcaagaagaaatcagtattcgacgctaaacgcgcaatcgtggccctgaaatggaaaggcattgaattacgtggcatcgaatttgacttgttgctggcttcatatctcctgaatccctcgcaaagcacggaagatgtcgcaagcgtggccaagaccaaacagtacatggcagtacagagtgattgggcagtctatggaaaaggtgcgaaacaaacggtgccagatgaaaacgttttagccgaacatctggtgcgtaaagctgctgcaattcgcgccctggagaaagaactgatccacgatttgcaggaaaatgaacaatacgccctgtttactgaccttgaattacctctgtcctcggtcctggcagagatggaatttaccggtgtgaaagtagatgttgaacgcctgaaagaaatgggcgaggagctcacagaacaactgcgccaagtggagcaggaaatctataagttagctggccaagagttcaacattaacagccctaaacaactgggtgtcattctgtttgaaaaattacagcttcccgtcctgaagaagacgaagaccggctatagtacgagtgctgatgtgctcgagaaacttgcccgtcagcatgaaatcgtccgcaaaattcttcactaccgtcagctcggtaaactgcaatccacatatattgaagggctgctgaaagttgtacatcgcgacacccataaagtccacaccatcttcaaccaggccctgactcaaaccgggcgcctgtcaagcaccgaacctaatctccagaacatcccaattcgtctggaagaaggccgcaaaattcgccaagcatttgtgccatcgaaacctgactgggttatctttagcgcagattactcacagattgagctccgtgttctcgcacacctggcaaacgatgaaaatctgatcgatgcttttcgtcatgaccttgacatccatacgaagacagccatggatattttccatgtaacagcagatgaagttacccccaatatgcgtcgccaagcaaaagccgtgaacttcggtattgtctatgggatctctgattacggtctgagtcagcgtcttggcatcacgcgcaaagaagccgccgaatttattcgtcgttatttcgaaagctttcccggcgttaaacagtacatggagaatattgtaaaagaagccaaacagaaaggatacgtcaccacccttttacaccgccgccgctatctgccagacatcacctctcgtaatcgcaacttacgttcattcgcagaacgcacggccatgaacaccccaattcaaggatcagccgccgacatcatcaagaaggcaatgattgatttagctgatcgtctgaaacgcgagaaacttcaagctcgtatgctgctccaggttcatgacgaactgattcttgaagctcctcgtgaggaagtcgaacgcctggttcagattgtacccgaggtcatggagaacgccatccagttaaccgtcccactgaaagttgattatcactacggtcctacgtggtacgacgctaag

SEQ ID NO: 228 - protein, 604 aa, synthetic construct
  REGION 1..604: note = Variant of DNA polymerase
MHHHHHHGGSGMVAPQTKKEMAVLPNINYTIVEEVTEPILADRSALVVEVLGSNYHKAPILGFALANEHGNFFIRTDTALSSPLFTAWLEDESKKKSVFDAKRAIVALKWKGIELRGIEFDLLLASYLLNPSQSTEDVASVAKTKQYMAVQSDWAVYGKGAKQTVPDENVLAEHLVRKAAAIRALEKELIHDLQENEQYALFTDLELPLSSVLAEMEFTGVKVDVERLKEMGEELTEQLRQVEQEIYKLAGQEFNINSPKQLGVILFEKLQLPVLKKTKTGYSTSADVLEKLARQHEIVRKILHYRQLGKLQSTYIEGLLKVVHRDTHKVHTIFNQALTQTGRLSSTEPNLQNIPIRLEEGRKIRQAFVPSKPDWVIFSADYSQIELRVLAHLANDENLIDAFRHDLDIHTKTAMDIFHVTADEVTPNMRRQAKAVNFGIVYGISDYGLSQRLGITRKEAAEFIRRYFESFPGVKQYMENIVKEAKQKGYVTTLLHRRRYLPDITSRNRNLRSFAERTAMNTPIQGSAADIIKKAMIDLADRLKREKLQARMLLQVHDELILEAPREEVERLVQIVPEVMENAIQLTVPLKVDYHYGPTWYDAK

SEQ ID NO: 229 - DNA, 1812 bp, synthetic construct
  misc_feature 1..1812: note = Variant of DNA polymerase
  source 1..1812: mol_type = other DNA
atgcatcaccatcaccatcacggtggcagcggtatggttgcaccacagaccaaaaaagaagaagccgtactgccgaacatcaattatacaattgtggaggaagtcaccgaaccgattctcgcggatcgttcggcgttagtggttgaggttctggggtccaactaccataaggctccgatcctgggctttgccctggccaatgaacacggtaacttcttcattcgcactgacacggctctttcttctccgctgtttaccgcgtggctggaggatgagagcaagaagaaatcagtattcgacgctaaacgcgcaatcgtggccctgaaatggaaaggcattgaattacgtggcatcgaatttgacttgttgctggcttcatatctcctgaatccctcgcaaagcacggaagatgtcgcaagcgtggccaagaccaaacagtacatggcagtacagcgcgatgaagcagtctatggaaaaggtgcgaaacaaacggtgccagatgaaaacgttttagccgaacatctggtgcgtaaagctgctgcaattcgcgccctggagaaagaactgatccacgatttgcaggaaaatgaacaatacgccctgtttactgaccttgaattacctctgtcctcggtcctggcagagatggaatttaccggtgtgaaagtagatgttgaacgcctgaaagaaatgggcgaggagctcacagaacaactgcgccaagtggagcaggaaatctataagttagctggccaagagttcaacattaacagccctaaacaactgggtgtcattctgtttgaaaaattacagcttcccgtcctgaagaagacgaagaccggctatagtacgagtgctgatgtgctcgagaaacttgcccgtcagcatgaaatcgtccgcaaaattcttcactaccgtcagctcggtaaactgcaatccacatatattgaagggctgctgaaagttgtacatcgcgacacccataaagtccacaccatcttcaaccaggccctgactcaaaccgggcgcctgtcaagcaccgaacctaatctccagaacatcccaattcgtctggaagaaggccgcaaaattcgccaagcatttgtgccatcgaaacctgactgggttatctttagcgcagattactcacagattgagctccgtgttctcgcacacctggcaaacgatgaaaatctgatcgatgcttttcgtcatgaccttgacatccatacgaagacagccatggatattttccatgtaacagcagatgaagttacccccaatatgcgtcgccaagcaaaagccgtgaacttcggtattgtctatgggatctctgattacggtctgagtcagcgtcttggcatcacgcgcaaagaagccgccgaatttattcgtcgttatttcgaaagctttcccggcgttaaacagtacatggagaatattgtaaaagaagccaaacagaaaggatacgtcaccacccttttacaccgccgccgctatctgccagacatccattctcgtaatcgcaacttacgttcattcgcagaacgcacggccatgaacaccccaattcaaggatcagccgccgacatcatcaagaaggcaatgattgatttagctgatcgtctgaaacgcgagaaacttcaagctcgtatgctgctccaggttcatgacgaactgattcttgaagctcctcgtgaggaagtcgaacgcctgcagcagattgtacccgaggtcatggagaacgccgtccagttaaccgtcccactgaaagttagctatcactacggtcctacgtggtacgacgctaag

SEQ ID NO: 230 - protein, 604 aa, synthetic construct
  REGION 1..604: note = Variant of DNA polymerase
MHHHHHHGGSGMVAPQTKKEEAVLPNINYTIVEEVTEPILADRSALVVEVLGSNYHKAPILGFALANEHGNFFIRTDTALSSPLFTAWLEDESKKKSVFDAKRAIVALKWKGIELRGIEFDLLLASYLLNPSQSTEDVASVAKTKQYMAVQRDEAVYGKGAKQTVPDENVLAEHLVRKAAAIRALEKELIHDLQENEQYALFTDLELPLSSVLAEMEFTGVKVDVERLKEMGEELTEQLRQVEQEIYKLAGQEFNINSPKQLGVILFEKLQLPVLKKTKTGYSTSADVLEKLARQHEIVRKILHYRQLGKLQSTYIEGLLKVVHRDTHKVHTIFNQALTQTGRLSSTEPNLQNIPIRLEEGRKIRQAFVPSKPDWVIFSADYSQIELRVLAHLANDENLIDAFRHDLDIHTKTAMDIFHVTADEVTPNMRRQAKAVNFGIVYGISDYGLSQRLGITRKEAAEFIRRYFESFPGVKQYMENIVKEAKQKGYVTTLLHRRRYLPDIHSRNRNLRSFAERTAMNTPIQGSAADIIKKAMIDLADRLKREKLQARMLLQVHDELILEAPREEVERLQQIVPEVMENAVQLTVPLKVSYHYGPTWYDAK

SEQ ID NO: 231 - DNA, 1812 bp, synthetic construct
  misc_feature 1..1812: note = Variant of DNA polymerase
  source 1..1812: mol_type = other DNA
atgcatcaccatcaccatcacggtggcagcggtatggttgcaccacagaccaaaaaagaagaagccgtactgccgaacatcaattatacaattgtggaggaagtcaccgaaccgattctcgcggatcgttcggcgttagtggttgaggttctggggtccaactaccataaggctccgatcctgggctttgccctggccaatgaacacggtaacttcttcattcgcactgacacggctctttcttctccgctgtttaccgcgtggctggaggatgagagcaagaagaaatcagtattcgacgctaaacgcgcaatcgtggccctgaaatggaaaggcattgaattacgtggcatcgaatttgacttgttgctggcttcatatctcctgaatccctcgcaaagcacggaagatgtcgcaagcgtggccaagaccaaacagtacatggcagtacagagtgattgggcagtctatggaaaaggtgcgaaacaaacggtgccagatgaaaacgttttagccgaacatctggtgcgtaaagctgctgcaattcgcgccctggagaaagaactgatccacgatttgcaggaaaatgaacaatacgccctgtttactgaccttgaattacctctgtcctcggtcctggcagagatggaatttaccggtgtgaaagtagatgttgaacgcctgaaagaaatgggcgaggagctcacagaacaactgcgccaagtggagcaggaaatctataagttagctggccaacgcttcaacattaacagccctaaacaactgggtgtcattctgtttgaaaaattacagcttcccgtcctgaagaagacgaagaccggctatagtacgagtgctgatgtgctcgagaaacttgcccgtcagcatgaaatcgtccgcaaaattcttcactaccgtcagctcggtaaactgcaatccacatatattgaagggctgctgaaagttgtacatcgcgacacccataaagtccacaccatcttcaaccaggccctgactcaaaccgggcgcctgtcaagcaccgaacctaatctccagaacatcccaattcgtctggaagaaggccgcaaaattcgccaagcatttgtgccatcgaaacctgactgggttatctttagcgcagattactcacagattgagctccgtgttctcgcacacctggcaaacgatgaaaatctgatcgatgcttttcgtcatgaccttgacatccatacgaagacagccatggatattttccatgtaacagcagatgaagttacccccaatatgcgtcgccaagcaaaagccgtgaacttcggtattgtctatgggatctctgattacggtctgagtcagcgtcttaacatcacgcgcaaagaagccgccgaatttattcgtcgttatttcgaaagctttcccggcgttaaacagtacatggagaatattgtaaaagaagccaaacagaaaggatacgtcaccacccttttacaccgccgccgctatctgccagacatccattctcgtaatcgcaacttacgttcattcgcagaacgcacggccatgaacaccccaattcaaggatcagccgccgacatcatcaagaaggcaatgattgatttagctgatcgtctgaaaaaagagaaacttcaagctcgtatgctgctccaggttcatgacgaactgattcttgaagctcctcgtgaggaagtcgaacgcctggttcagattgtacccgaggtcatggagaacgccgtccagttaaccgtcccactgaaagttgattatcactacggtcctacgtggtacgacgctaag

SEQ ID NO: 232 - protein, 604 aa, synthetic construct
  REGION 1..604: note = Variant of DNA polymerase
MHHHHHHGGSGMVAPQTKKEEAVLPNINYTIVEEVTEPILADRSALVVEVLGSNYHKAPILGFALANEHGNFFIRTDTALSSPLFTAWLEDESKKKSVFDAKRAIVALKWKGIELRGIEFDLLLASYLLNPSQSTEDVASVAKTKQYMAVQSDWAVYGKGAKQTVPDENVLAEHLVRKAAAIRALEKELIHDLQENEQYALFTDLELPLSSVLAEMEFTGVKVDVERLKEMGEELTEQLRQVEQEIYKLAGQRFNINSPKQLGVILFEKLQLPVLKKTKTGYSTSADVLEKLARQHEIVRKILHYRQLGKLQSTYIEGLLKVVHRDTHKVHTIFNQALTQTGRLSSTEPNLQNIPIRLEEGRKIRQAFVPSKPDWVIFSADYSQIELRVLAHLANDENLIDAFRHDLDIHTKTAMDIFHVTADEVTPNMRRQAKAVNFGIVYGISDYGLSQRLNITRKEAAEFIRRYFESFPGVKQYMENIVKEAKQKGYVTTLLHRRRYLPDIHSRNRNLRSFAERTAMNTPIQGSAADIIKKAMIDLADRLKKEKLQARMLLQVHDELILEAPREEVERLVQIVPEVMENAVQLTVPLKVDYHYGPTWYDAK

SEQ ID NO: 233 - DNA, 1812 bp, synthetic construct
  misc_feature 1..1812: note = Variant of DNA polymerase
  source 1..1812: mol_type = other DNA
atgcatcaccatcaccatcacggtggcagcggtatggttgcaccacagaccaaaaaagaagaggccgtactgccgaacatcaattatacaattgtggaggaagtcaccgaaccgattctcgcggatcgttcggcgttagtggttgaggttctggggtccaactaccataaggctccgatcctgggctttgccctggccaatgaacacggtaacttcttcattcgcactgacacggctctttcttctccgctgtttaccgcgtggctggaggatgagagcaagaagaaatcagtattcgacgctaaacgcgcaatcgtggccctgaaatggaaaggcattgaattacgtggcatcgaatttgacttgttgctggcttcatatctcctgaatccctcgcaaagcacggaagatgtcgcaagcgtggccaagaccaaacagtacatggcagtacagagtgatgaggcagtctatggaaaaggtgcgaaacaaacggtgccagatgaaaacgttttagccgaacatctggtgcgtaaagctgctgcaattcgcgccctggagaaagaactgatccacgatttgcaggaaaatgaacaatacgccctgtttactgaccttgaattacctctgtcctcggtcctggcagagatggaatttaccggtgtgaaagtagatgttgaacgcctgaaagaaatgggcgaggagctcacagaacaactgcgccaagtggagcaggaaatctataagttagctggccaacgcttcaacattaacagccctaaacaactgggtgtcattctgtttgaaaaattacagcttcccgtcctgaagaagacgaagaccggctatagtacgagtgctgatgtgctcgagaaacttgcccgtcagcatgaaatcgtccgcaaaattcttcactaccgtcagctcggtaaactgcaatccacatatattgaagggctgctgaaagttgtacatcgcgacacccataaagtccacaccatcttcaaccaggccctgactcaaaccgggcgcctgtcaagcaccgaacctaatctccagaacatcccaattcgtctggaagaaggccgcaaaattcgccaagcatttgtgccatcgaaacctgactgggttatctttagcgcagattactcacagattgagctccgtgttctcgcacacctggcaaacgatgaaaatctgatcgatgcttttcgtcatgaccttgacatccatacgaagacagccatggatattttccatgtaacagcagatgaagttacccccaatatgcgtcgccaagcaaaagccgtgaacttcggtattgtctatgggatctctgattacggtctgagtcagcgtcttggcatcacgcgcaaagaagccgccgaatttattcgtcgttatttcgaaagctttcccggcgttaaacagtacatggagaatattgtaaaagaagccaaacagaaaggatacgtcaccacccttttacaccgccgccgctatctgccagacatccattctcgtaatcgcaacttacgttcattcgcagaacgcacggccatgaacaccccaattcaaggatcagccgccgacatcatcaagaaggcaatgattgatttagctgatcgtctgaaacgcgagaaacttcaagctcgtatgctgctccaggttcatgacgaactgattcttgaagctcctcgtgaggaagtcgaacgcctggttcagattgtacccgaggtcatggagaacgccatccagttaaccgtcccactgaaagttgattatcactacggtcctacgtggtacgacgctaag

SEQ ID NO: 234 - protein, 604 aa, synthetic construct
  REGION 1..604: note = Variant of DNA polymerase
MHHHHHHGGSGMVAPQTKKEEAVLPNINYTIVEEVTEPILADRSALVVEVLGSNYHKAPILGFALANEHGNFFIRTDTALSSPLFTAWLEDESKKKSVFDAKRAIVALKWKGIELRGIEFDLLLASYLLNPSQSTEDVASVAKTKQYMAVQSDEAVYGKGAKQTVPDENVLAEHLVRKAAAIRALEKELIHDLQENEQYALFTDLELPLSSVLAEMEFTGVKVDVERLKEMGEELTEQLRQVEQEIYKLAGQRFNINSPKQLGVILFEKLQLPVLKKTKTGYSTSADVLEKLARQHEIVRKILHYRQLGKLQSTYIEGLLKVVHRDTHKVHTIFNQALTQTGRLSSTEPNLQNIPIRLEEGRKIRQAFVPSKPDWVIFSADYSQIELRVLAHLANDENLIDAFRHDLDIHTKTAMDIFHVTADEVTPNMRRQAKAVNFGIVYGISDYGLSQRLGITRKEAAEFIRRYFESFPGVKQYMENIVKEAKQKGYVTTLLHRRRYLPDIHSRNRNLRSFAERTAMNTPIQGSAADIIKKAMIDLADRLKREKLQARMLLQVHDELILEAPREEVERLVQIVPEVMENAIQLTVPLKVDYHYGPTWYDAK

SEQ ID NO: 235 - DNA, 1812 bp, synthetic construct
  misc_feature 1..1812: note = Variant of DNA polymerase
  source 1..1812: mol_type = other DNA
atgcatcaccatcaccatcacggtggcagcggtatggttgcaccacagaccaaaaaagaagaggccgtactgccgaacatcaattatacaattgtggaggaagtcaccgaaccgattctcgcggatcgttcggcgttagtggttgaggttctggggtccaactaccataaggctccgatcctgggctttgccctggccaatgaacacggtaacttcttcattcgcactgacacggctctttcttctccgctgtttaccgcgtggctggaggatgagagcaagaagaaatcagtattcgacgctaaacgcgcaatcgtggccctgaaatggaaaggcattgaattacgtggcatcgaatttgacttgttgctggcttcatatctcctgaatccctcgcaaagcacggaagatgtcgcaagcgtggccaagaccaaacagtacatggcagtacagagtgattgggcagtctatggaaaaggtgcgaaacaaacggtgccagatgaaaacgttttagccgaacatctggtgcgtaaagctgctgcaattcgcgccctggagaaagaactgatccacgatttgcaggaaaatgaacaatacgccctgtttactgaccttgaattacctctgtcctcggtcctggcagagatggaatttaccggtgtgaaagtagatgttgaacgcctgaaagaaatgggcgaggagctcacagaacaactgcgccaagtggagcaggaaatctataagttagctggccaacgcttcaacattaacagccctaaacaactgggtgtcattctgtttgaaaaattacagcttcccgtcctgaagaagacgaagaccggctatagtacgagtgctgatgtgctcgagaaacttgcccgtcagcatgaaatcgtccgcaaaattcttcactaccgtcagctcggtaaactgcaatccacatatattgaagggctgctgaaagttgtacatcgcgacacccataaagtccacaccatcttcaaccaggccctgactcaaaccgggcgcctgtcaagcaccgaacctaatctccagaacatcccaattcgtctggaagaaggccgcaaaattcgccaagcatttgtgccatcgaaacctgactgggttatctttagcgcagattactcacagattgagctccgtgttctcgcacacctggcaaacgatgaaaatctgatcgatgcttttcgtcatgaccttgacatccatacgaagacagccatggatattttccatgtaacagcagatgaagttacccccaatatgcgtcgccaagcaaaagccgtgaacttcggtattgtctatgggatctctgattacggtctgagtcagcgtcttggcatcacgcgcaaagaagccgccgaatttattcgtcgttatttcgaaagctttcccggcgttaaacagtacatggagaatattgtaaaagaagccaaacagaaaggatacgtcaccacccttttacaccgccgccgctatctgccagacatcacctctcgtaatcgtaacttacgttcattcgcagaacgcacggccatgaacaccccaattcaaggatcagccgccgacatcatcaagaaggcaatgattgatttagctggccgtctgaaacgcgagaaacttcaagctcgtatgctgctccaggttcatgacgaactgattcttgaagctcctcgtgaggaagtcgaacgcctggttcagattgtacccgaggtcatggagaacgccgtccagttaaccgtcccactgaaagttgattatcactacggtcctacgtggtacgacgctaag

SEQ ID NO: 236 - protein, 604 aa, synthetic construct
  REGION 1..604: note = Variant of DNA polymerase
MHHHHHHGGSGMVAPQTKKEEAVLPNINYTIVEEVTEPILADRSALVVEVLGSNYHKAPILGFALANEHGNFFIRTDTALSSPLFTAWLEDESKKKSVFDAKRAIVALKWKGIELRGIEFDLLLASYLLNPSQSTEDVASVAKTKQYMAVQSDWAVYGKGAKQTVPDENVLAEHLVRKAAAIRALEKELIHDLQENEQYALFTDLELPLSSVLAEMEFTGVKVDVERLKEMGEELTEQLRQVEQEIYKLAGQRFNINSPKQLGVILFEKLQLPVLKKTKTGYSTSADVLEKLARQHEIVRKILHYRQLGKLQSTYIEGLLKVVHRDTHKVHTIFNQALTQTGRLSSTEPNLQNIPIRLEEGRKIRQAFVPSKPDWVIFSADYSQIELRVLAHLANDENLIDAFRHDLDIHTKTAMDIFHVTADEVTPNMRRQAKAVNFGIVYGISDYGLSQRLGITRKEAAEFIRRYFESFPGVKQYMENIVKEAKQKGYVTTLLHRRRYLPDITSRNRNLRSFAERTAMNTPIQGSAADIIKKAMIDLAGRLKREKLQARMLLQVHDELILEAPREEVERLVQIVPEVMENAVQLTVPLKVDYHYGPTWYDAK

SEQ ID NO: 237 - DNA, 1812 bp, synthetic construct
  misc_feature 1..1812: note = Variant of DNA polymerase
  source 1..1812: mol_type = other DNA
atgcatcaccatcaccatcacggtggcagcggtatggttgcaccacagaccaaaaaagaagaggccgtactgccgaacatcaattatacaattgtggaggaagtcaccgaaccgattctcgcggatcgttcggcgttagtggttgaggttctggggtccaactaccataaggctccgatcctgggctttgccctggccaatgaacacggtaacttcttcattcgcactgacacggctctttcttctccgctgtttaccgcgtggctggaggatgagagcaagaagaaatcagtattcgacgctaaacgcgcaatcgtggccctgaaatggaaaggcattgaattacgtggcatcgaatttgacttgttgctggcttcatatctcctgaatccctcgcaaagcacggaagatgtcgcaagcgtggccaagaccaaacagtacatggcagtacagagtgattgggcagtctatggaaaaggtgcgaaacaaacggtgccagatgaaaacgttttagccgaacatctggtgcgtaaagctgctgcaattcgcgccctggagaaagaactgatccacgatttgcaggaaaatgaacaatacgccctgtttactgaccttgaattacctctgtcctcggtcctggcagagatggaatttaccggtgtgaaagtagatgttgaacgcctgaaagaaatgggcgaggagctcacagaacaactgcgccaagtggagcaggaaatctataagttagctggccaagagttcaacattaacagccctaaacaactgggtgtcattctgtttgaaaaattacagcttcccgtcctgaagaagacgaagaccggctatagtacgagtgctgatgtgctcgagaaacttgcccgtcagcatgaaatcgtccgcaaaattcttcactaccgtcagctcggtaaactgcaatccacatatattgaagggctgctgaaagttgtacatcgcgacacccataaagtccacaccatcttcaaccaggccctgactcaaaccgggcgcctgtcaagcaccgaacctaatctccagaacatcccaattcgtctggaagaaggccgcaaaattcgccaagcatttgtgccatcgaaacctgactgggttatctttagcgcagattactcacagattgagctccgtgttctcgcacacctggcaaacgatgaaaatctgatcgatgcttttcgtcatgaccttgacatccatacgaagacagccatggatattttccatgtaacagcagatgaagttacccccaatatgcgtcgccaagcaaaagccgtgaacttcggtattgtctatgggatctctgattacggtctgagtcagcgtcttggcatcccgcgcaaagaagccgccgaatttattcgtcgttatttcgaaagctttcccggcgttaaacagtacatggagaatattgtaaaagaagccaaacagaaaggatacgtcaccacccttttacaccgccgccgctatctgccagacatccattctcgtaatcgcaacttacgttcattcgcagaacgcacggccatgaacaccccaattcaaggatcagccgccgacatcatcaagaaggcaatgattgatttagctgaccgtctgaaacgcgagaaacttcaagctcgtatgctgctccaggttcatgacgaactgattcttgaagctcctcgtgaggaagtcgaacgcctgcagcagattgtacccgaggtcatggagaacgccatccagttaaccgtcccactgaaagttgattatcactacggtcctacgtggtacgacgctaag

SEQ ID NO: 238 - protein, 604 aa, synthetic construct
  REGION 1..604: note = Variant of DNA polymerase
MHHHHHHGGSGMVAPQTKKEEAVLPNINYTIVEEVTEPILADRSALVVEVLGSNYHKAPILGFALANEHGNFFIRTDTALSSPLFTAWLEDESKKKSVFDAKRAIVALKWKGIELRGIEFDLLLASYLLNPSQSTEDVASVAKTKQYMAVQSDWAVYGKGAKQTVPDENVLAEHLVRKAAAIRALEKELIHDLQENEQYALFTDLELPLSSVLAEMEFTGVKVDVERLKEMGEELTEQLRQVEQEIYKLAGQEFNINSPKQLGVILFEKLQLPVLKKTKTGYSTSADVLEKLARQHEIVRKILHYRQLGKLQSTYIEGLLKVVHRDTHKVHTIFNQALTQTGRLSSTEPNLQNIPIRLEEGRKIRQAFVPSKPDWVIFSADYSQIELRVLAHLANDENLIDAFRHDLDIHTKTAMDIFHVTADEVTPNMRRQAKAVNFGIVYGISDYGLSQRLGIPRKEAAEFIRRYFESFPGVKQYMENIVKEAKQKGYVTTLLHRRRYLPDIHSRNRNLRSFAERTAMNTPIQGSAADIIKKAMIDLADRLKREKLQARMLLQVHDELILEAPREEVERLQQIVPEVMENAIQLTVPLKVDYHYGPTWYDAK

SEQ ID NO: 239 - DNA, 1812 bp, synthetic construct
  misc_feature 1..1812: note = Variant of DNA polymerase
  source 1..1812: mol_type = other DNA
atgcatcaccatcaccatcacggtggcagcggtatggttgcaccacagaccaaaaaagaaatggccgtactgccgaacatcaattatacaattgtggaggaagtcaccgaaccgattctcgcggatcgttcggcgttagtggttgaggttctggggtccaactaccataaggctccgatcctgggctttgccctggccaatgaacacggtaacttcttcattcgcactgacacggctctttcttctccgctgtttaccgcgtggctggaggatgagagcaagaagaaatcagtattcgacgctaaacgcgcaatcgtggccctgaaatggaaaggcattgaattacgtggcatcgaatttgacttgttgctggcttcatatctcctgaatccctcgcaaagcacggaagatgtcgcaagcgtggccaagaccaaacagtacatggcagtacagagtgatgaggcagtctatggaaaaggtgcgaaacaaacggtgccagatgaaaacgttttagccgaacatctggtgcgtaaagctgctgcaattcgcgccctggagaaagaactgatccacgatttgcaggaaaatgaacaatacgccctgtttactgaccttgaattacctctgtcctcggtcctggcagagatggaatttaccggtgtgaaagtagatgttgaacgcctgaaagaaatgggcgaggagctcacagaacaactgcgccaagtggagcaggaaatctataagttagctggccaacgcttcaacattaacagccctaaacaactgggtgtcattctgtttgaaaaattacagcttcccgtcctgaagaagacgaagaccggctatagtacgagtgctgatgtgctcgagaaacttgcccgtcagcatgaaatcgtccgcaaaattcttcactaccgtcagctcggtaaactgcaatccacatatattgaagggctgctgaaagttgtacatcgcgacacccataaagtccacaccatcttcaaccaggccctgactcaaaccgggcgcctgtcaagcaccgaacctaatctccagaacatcccaattcgtctggaagaaggccgcaaaattcgccaagcatttgtgccatcgaaacctgactgggttatctttagcgcagattactcacagattgagctccgtgttctcgcacacctggcaaacgatgaaaatctgatcgatgcttttcgtcatgaccttgacatccatacgaagacagccatggatattttccatgtaacagcagatgaagttacccccaatatgcgtcgccaagcaaaagccgtgaacttcggtattgtctatgggatctctgattacggtctgagtcagcgtcttggcatcacgcgcaaagaagccgccgaatttattcgtcgttatttcgaaagctttcccggcgttaaacagtacatggagaatattgtaaaagaagccaaacagaaaggatacgtcaccacccttttacaccgccgccgctatctgccagacatcacctctcgtaatcgcaacttacgttcattcgcagaacgcacggccatgaacaccccaattcaaggatcagccgccgacatcatcaagaaggcaatgattgatttagctgatcgtctgaaaaaagagaaacttcaagctcgtatgctgctccaggttcatgacgaactgattcttgaagctcctcgtgaggaagtcgaacgcctggttcagattgtacccgaggtcatggagaacgccatccagttaaccgtcccactgaaagttagctatcactacggtcctacgtggtacgacgctaag

SEQ ID NO: 240 - protein, 604 aa, synthetic construct
  REGION 1..604: note = Variant of DNA polymerase
MHHHHHHGGSGMVAPQTKKEMAVLPNINYTIVEEVTEPILADRSALVVEVLGSNYHKAPILGFALANEHGNFFIRTDTALSSPLFTAWLEDESKKKSVFDAKRAIVALKWKGIELRGIEFDLLLASYLLNPSQSTEDVASVAKTKQYMAVQSDEAVYGKGAKQTVPDENVLAEHLVRKAAAIRALEKELIHDLQENEQYALFTDLELPLSSVLAEMEFTGVKVDVERLKEMGEELTEQLRQVEQEIYKLAGQRFNINSPKQLGVILFEKLQLPVLKKTKTGYSTSADVLEKLARQHEIVRKILHYRQLGKLQSTYIEGLLKVVHRDTHKVHTIFNQALTQTGRLSSTEPNLQNIPIRLEEGRKIRQAFVPSKPDWVIFSADYSQIELRVLAHLANDENLIDAFRHDLDIHTKTAMDIFHVTADEVTPNMRRQAKAVNFGIVYGISDYGLSQRLGITRKEAAEFIRRYFESFPGVKQYMENIVKEAKQKGYVTTLLHRRRYLPDITSRNRNLRSFAERTAMNTPIQGSAADIIKKAMIDLADRLKKEKLQARMLLQVHDELILEAPREEVERLVQIVPEVMENAIQLTVPLKVSYHYGPTWYDAK

SEQ ID NO: 241 - DNA, 1812 bp, synthetic construct
  misc_feature 1..1812: note = Variant of DNA polymerase
  source 1..1812: mol_type = other DNA
atgcatcaccatcaccatcacggtggcagcggtatggttgcaccacagaccaaaaaagaagaagccgtactgccgaacatcaattatacaattgtggaggaagtcaccgaaccgattctcgcggatcgttcggcgttagtggttgaggttctggggtccaactaccataaggctccgatcctgggctttgccctggccaatgaacacggtaacttcttcattcgcactgacacggctctttcttctccgctgtttaccgcgtggctggaggatgagagcaagaagaaatcagtattcgacgctaaacgcgcaatcgtggccctgaaatggaaaggcattgaattacgtggcatcgaatttgacttgttgctggcttcatatctcctgaatccctcgcaaagcacggaagatgtcgcaagcgtggccaagaccaaacagtacatggcagtacagagtgatgaggcagtctatggaaaaggtgcgaaacaaacggtgccagatggaaacgttttagccgaacatctggtgcgtaaagctgctgcaattcgcgccctggagaaagaactgatccacgatttgcaggaaaatgaacaatacgccctgtttactgaccttgaattacctctgtcctcggtcctggcagagatggaatttaccggtgtgaaagtagatgttgaacgcctgaaagaaatgggcgaggagctcacagaacaactgcgccaagtggagcaggaaatctataagttagctggccaagagttcaacattaacagccctaaacaactgggtgtcattctgtttgaaaaattacagcttcccgtcctgaagaagacgaagaccggctatagtacgagtgctgatgtgctcgagaaacttgcccgtcagcatgaaatcgtccgcaaaattcttcactaccgtcagctcggtaaactgcaatccacatatattgaagggctgctgaaagttgtacatcgcgacacccataaagtccacaccatcttcaaccaggccctgactcaaaccgggcgcctgtcaagcaccgaacctaatctccagaacatcccaattcgtctggaagaaggccgcaaaattcgccaagcatttgtgccatcgaaacctgactgggttatctttagcgcagattactcacagattgagctccgtgttctcgcacacctggcaaacgatgaaaatctgatcgatgcttttcgtcatgaccttgacatccatacgaagacagccatggatattttccatgtaacagcagatgaagttacccccaatatgcgtcgccaagcaaaagccgtgaacttcggtattgtctatgggatctctgattacggtctgagtcagcgtcttggcatcacgcgcaaagaagccgccgaatttattcgtcgttatttcgaaagctttcccggcgttaaacagtacatggagaatattgtaaaagaagccaaacagaaaggatacgtcaccacccttttacaccgccgccgctatctgccagacatcacctctcgtaatcgcaacttacgttcattcgcagaacgcacggccatgaacaccccaattcaaggatcagccgccgacatcatcaagaaggcaatgattgatttagctgatcgtctgaaaaaagagaaacttcaagctcgtatgctgctccaggttcatgacgaactgattcttgaagctcctcgtgaggaagtcgaacgcctggttcagattgtacccgaggtcatggagaacgccatccagttaaccgtcccactgaaagttgattatcactacggtcctacgtggtacgacgctaag

SEQ ID NO: 242 - protein, 604 aa, synthetic construct
  REGION 1..604: note = Variant of DNA polymerase
MHHHHHHGGSGMVAPQTKKEEAVLPNINYTIVEEVTEPILADRSALVVEVLGSNYHKAPILGFALANEHGNFFIRTDTALSSPLFTAWLEDESKKKSVFDAKRAIVALKWKGIELRGIEFDLLLASYLLNPSQSTEDVASVAKTKQYMAVQSDEAVYGKGAKQTVPDGNVLAEHLVRKAAAIRALEKELIHDLQENEQYALFTDLELPLSSVLAEMEFTGVKVDVERLKEMGEELTEQLRQVEQEIYKLAGQEFNINSPKQLGVILFEKLQLPVLKKTKTGYSTSADVLEKLARQHEIVRKILHYRQLGKLQSTYIEGLLKVVHRDTHKVHTIFNQALTQTGRLSSTEPNLQNIPIRLEEGRKIRQAFVPSKPDWVIFSADYSQIELRVLAHLANDENLIDAFRHDLDIHTKTAMDIFHVTADEVTPNMRRQAKAVNFGIVYGISDYGLSQRLGITRKEAAEFIRRYFESFPGVKQYMENIVKEAKQKGYVTTLLHRRRYLPDITSRNRNLRSFAERTAMNTPIQGSAADIIKKAMIDLADRLKKEKLQARMLLQVHDELILEAPREEVERLVQIVPEVMENAIQLTVPLKVDYHYGPTWYDAK

SEQ ID NO: 243 - DNA, 1812 bp, synthetic construct
  misc_feature 1..1812: note = Variant of DNA polymerase
  source 1..1812: mol_type = other DNA
atgcatcaccatcaccatcacggtggcagcggtatggttgcaccacagaccaaaaaagaagaggccgtactgccgaacatcaattatacaattgtggaggaagtcaccgaaccgattctcgcggatcgttcggcgttagtggttgaggttctggggtccaactaccataaggctccgatcctgggctttgccctggccaatgaacacggtaacttcttcattcgcactgacacggctctttcttctccgctgtttaccgcgtggctggaggatgagagcaagaagaaatcagtattcgacgctaaacgcgcaatcgtggccctgaaatggaaaggcattgaattacgtggcatcgaatttgacttgttgctggcttcatatctcctgaatccctcgcaaagcacggaagatgtcgcaagcgtggccaagaccaaacagtacatggcagtacagagtgatgaggcagtctatggaaaaggtgcgaaacaaacggtgccagatgaaaacgttttagccgaacatctggtgcgtaaagctgctgcaattcgcgccctggagaaagaactgatccacgatttgcaggaaaatgaacaatacgccctgtttactgaccttgaattacctctgtcctcggtcctggcagagatggaatttaccggtgtgaaagtagatgttgaacgcctgaaagaaatgggcgaggagctcacagaacaactgcgccaagtggagcaggaaatctataagttagctggccaacgcttcaacattaacagccctaaacaactgggtgtcattctgtttgaaaaattacagcttcccgtcctgaagaagacgaagaccggctatagtacgagtgctgatgtgctcgagaaacttgcccgtcagcatgaaatcgtccgcaaaattcttcactaccgtcagctcggtaaactgcaatccacatatattgaagggctgctgaaagttgtacatcgcgacacccataaagtccacaccatcttcaaccaggccctgactcaaaccgggcgcctgtcaagcaccgaacctaatctccagaacatcccaattcgtctggaagaaggccgcaaaattcgccaagcatttgtgccatcgaaacctgactgggttatctttagcgcagattactcacagattgagctccgtgttctcgcacacctggcaaacgatgaaaatctgatcgatgcttttcgtcatgaccttgacatccatacgaagacagccatggatattttccatgtaacagcagatgaagttacccccaatatgcgtcgccaagcaaaagccgtgaacttcggtattgtctatgggatctctgattacggtctgagtcagcgtcttggcatcccgcgcaaagaagccgccgaatttattcgtcgttatttcgaaagctttcccggcgttaaacagtacatggagaatattgtaaaagaagccaaacagaaaggatacgtcaccacccttttacaccgccgccgctatctgccagacatccattctcgtaatcgcaacttacgttcattcgcagaacgcacggccatgaacaccccaattcaaggatcagccgccgacatcatcaagaaggcaatgattgatttagctgatcgtctgaaacgcgagaaacttcaagctcgtatgctgctccaggttcatgacgaactgattcttgaagctcctcgtgaggaagtcgaacgcctggttcagattgtacccgaggtcatggagaacgccatccagttaaccgtcccactgaaagttgattatcactacggtcctacgtggtacgacgctaag

SEQ ID NO: 244 - protein, 604 aa, synthetic construct
  REGION 1..604: note = Variant of DNA polymerase
MHHHHHHGGSGMVAPQTKKEEAVLPNINYTIVEEVTEPILADRSALVVEVLGSNYHKAPILGFALANEHGNFFIRTDTALSSPLFTAWLEDESKKKSVFDAKRAIVALKWKGIELRGIEFDLLLASYLLNPSQSTEDVASVAKTKQYMAVQSDEAVYGKGAKQTVPDENVLAEHLVRKAAAIRALEKELIHDLQENEQYALFTDLELPLSSVLAEMEFTGVKVDVERLKEMGEELTEQLRQVEQEIYKLAGQRFNINSPKQLGVILFEKLQLPVLKKTKTGYSTSADVLEKLARQHEIVRKILHYRQLGKLQSTYIEGLLKVVHRDTHKVHTIFNQALTQTGRLSSTEPNLQNIPIRLEEGRKIRQAFVPSKPDWVIFSADYSQIELRVLAHLANDENLIDAFRHDLDIHTKTAMDIFHVTADEVTPNMRRQAKAVNFGIVYGISDYGLSQRLGIPRKEAAEFIRRYFESFPGVKQYMENIVKEAKQKGYVTTLLHRRRYLPDIHSRNRNLRSFAERTAMNTPIQGSAADIIKKAMIDLADRLKREKLQARMLLQVHDELILEAPREEVERLVQIVPEVMENAIQLTVPLKVDYHYGPTWYDAK

SEQ ID NO: 245 - DNA, 1812 bp, synthetic construct
  misc_feature 1..1812: note = Variant of DNA polymerase
  source 1..1812: mol_type = other DNA
atgcatcaccatcaccatcacggtggcagcggtatggttgcaccacagaccaaaaaagaagaggccgtactgccgaacatcaattatacaattgtggaggaagtcaccgaaccgattctcgcggatcgttcggcgttagtggttgaggttctggggtccaactaccataaggctccgatcctgggctttgccctggccaatgaacacggtaacttcttcattcgcactgacacggctctttcttctccgctgtttaccgcgtggctggaggatgagagcaagaagaaatcagtattcgacgctaaacgcgcaatcgtggccctgaaatggaaaggcattgaattacgtggcatcgaatttgacttgttgctggcttcatatctcctgaatccctcgcaaagcacggaagatgtcgcaagcgtggccaagaccaaacagtacatggcagtacagagtgattgggcagtctatggaaaaggtgcgaaacaaacggtgccagatgaaaacgttttagccgaacatctggtgcgtaaagctgctgcaattcgcgccctggagaaagaactgatccacgatttgcaggaaaatgaacaatacgccctgtttactgaccttgaattacctctgtcctcggtcctggcagagatggaatttaccggtgtgaaagtagatgttgaacgcctgaaagaaatgggcgaggagctcacagaacaactgcgccaagtggagcaggaaatctataagttagctggccaagagttcaacattaacagccctaaacaactgggtgtcattctgtttgaaaaattacagcttcccgtcctgaagaagacgaagaccggctatagtacgagtgctgatgtgctcgagaaacttgcccgtcagcatgaaatcgtccgcaaaattcttcactaccgtcagctcggtaaactgcaatccacatatattgaagggctgctgaaagttgtacatcgcgacacccataaagtccacaccatcttcaaccaggccctgactcaaaccgggcgcctgtcaagcaccgaacctaatctccagaacatcccaattcgtctggaagaaggccgcaaaattcgccaagcatttgtgccatcgaaacctgactgggttatctttagcgcagattactcacagattgagctccgtgttctcgcacacctggcaaacgatgaaaatctgatcgatgcttttcgtcatgaccttgacatccatacgaagacagccatggatattttccatgtaacagcagatgaagttacccccaatatgcgtcgccaagcaaaagccgtgaacttcggtattgtctatgggatctctgattacggtctgagtcagcgtcttaacatcccgcgcaaagaagccgccgaatttattcgtcgttatttcgaaagctttcccggcgttaaacagtacatggagaatattgtaaaagaagccaaacagaaaggatacgtcaccacccttttacaccgccgccgctatctgccagacatccattctcgtaatcgcaacttacgttcattcgcagaacgcacggccatgaacaccccaattcaaggatcagccgccgacatcatcaagaaggcaatgattgatttagctgatcgtctgaaaaaagagaaacttcaagctcgtatgctgctccaggttcatgacgaactgattcttgaagctcctcgtgaggaagtcgaacgcctgcagcagattgtacccgaggtcatggagaacgccgtccagttaaccgtcccactgaaagttgattatcactacggtcctacgtggtacgacgctaag

SEQ ID NO: 246 - protein, 604 aa, synthetic construct
  REGION 1..604: note = Variant of DNA polymerase
MHHHHHHGGSGMVAPQTKKEEAVLPNINYTIVEEVTEPILADRSALVVEVLGSNYHKAPILGFALANEHGNFFIRTDTALSSPLFTAWLEDESKKKSVFDAKRAIVALKWKGIELRGIEFDLLLASYLLNPSQSTEDVASVAKTKQYMAVQSDWAVYGKGAKQTVPDENVLAEHLVRKAAAIRALEKELIHDLQENEQYALFTDLELPLSSVLAEMEFTGVKVDVERLKEMGEELTEQLRQVEQEIYKLAGQEFNINSPKQLGVILFEKLQLPVLKKTKTGYSTSADVLEKLARQHEIVRKILHYRQLGKLQSTYIEGLLKVVHRDTHKVHTIFNQALTQTGRLSSTEPNLQNIPIRLEEGRKIRQAFVPSKPDWVIFSADYSQIELRVLAHLANDENLIDAFRHDLDIHTKTAMDIFHVTADEVTPNMRRQAKAVNFGIVYGISDYGLSQRLNIPRKEAAEFIRRYFESFPGVKQYMENIVKEAKQKGYVTTLLHRRRYLPDIHSRNRNLRSFAERTAMNTPIQGSAADIIKKAMIDLADRLKKEKLQARMLLQVHDELILEAPREEVERLQQIVPEVMENAVQLTVPLKVDYHYGPTWYDAK

SEQ ID NO: 247 - DNA, 1812 bp, synthetic construct
  misc_feature 1..1812: note = Variant of DNA polymerase
  source 1..1812: mol_type = other DNA
atgcatcaccatcaccatcacggtggcagcggtatggttgcaccacagaccaaaaaagaagaggccgtactgccgaacatcaattatacaattgtggaggaagtcaccgaaccgattctcgcggatcgttcggcgttagtggttgaggttctggggtccaactaccataaggctccgatcctgggctttgccctggccaatgaacacggtaacttcttcattcgcactgacacggctctttcttctccgctgtttaccgcgtggctggaggatgagagcaagaagaaatcagtattcgacgctaaacgcgcaatcgtggccctgaaatggaaaggcattgaattacgtggcatcgaatttgacttgttgctggcttcatatctcctgaatccctcgcaaagcacggaagatgtcgcaagcgtggccaagaccaaacagtacatggcagtacagagtgattgggcagtctatggaaaaggtgcgaaacaaacggtgccagatgaaaacgttttagccgaacatctggtgcgtaaagctgctgcaattcgcgccctggagaaagaactgatccacgatttgcaggaaaatgaacaatacgccctgtttactgaccttgaattacctctgtcctcggtcctggcagagatggaatttaccggtgtgaaagtagatgttgaacgcctgaaagaaatgggcgaggagctcacagaacaactgcgccaagtggagcaggaaatctataagttagctggccaacgcttcaacattaacagccctaaacaactgggtgtcattctgtttgaaaaattacagcttcccgtcctgaagaagacgaagaccggctatagtacgagtgctgatgtgctcgagaaacttgcccgtcagcatgaaatcgtccgcaaaattcttcactaccgtcagctcggtaaactgcaatccacatatattgaagggctgctgaaagttgtacatcgcgacacccataaagtccacaccatcttcaaccaggccctgactcaaaccgggcgcctgtcaagcaccgaacctaatctccagaacatcccaattcgtctggaagaaggccgcaaaattcgccaagcatttgtgccatcgaaacctgactgggttatctttagcgcagattactcacagattgagctccgtgttctcgcacacctggcaaacgatgaaaatctgatcgatgcttttcgtcatgaccttgacatccatacgaagacagccatggatattttccatgtaacagcagatgaagttacccccaatatgcgtcgccaagcaaaagccgtgaacttcggtattgtctatgggatctctgattacggtctgagtcagcgtcttaacatcacgcgcaaagaagccgccgaatttattcgtcgttatttcgaaagctttcccggcgttaaacagtacatggagaatattgtaaaagaagccaaacagaaaggatacgtcaccacccttttacaccgccgccgctatctgccagacatcacctctcgtaatcgcaacttacgttcattcgcagaacgcacggccatgaacaccccaattcaaggatcagccgccgacatcatcaagaaggcaatgattgatttagctcgtcgtctgaaacgcgagaaacttcaagctcgtatgctgctccaggttcatgacgaactgattcttgaagctcctcgtgaggaagtcgaacgcctggttcagattgtacccgaggtcatggagaacgccgtccagttaaccgtcccactgaaagttgattatcactacggtcctacgtggtacgacgctaag

SEQ ID NO: 248 - protein, 604 aa, synthetic construct
  REGION 1..604: note = Variant of DNA polymerase
MHHHHHHGGSGMVAPQTKKEEAVLPNINYTIVEEVTEPILADRSALVVEVLGSNYHKAPILGFALANEHGNFFIRTDTALSSPLFTAWLEDESKKKSVFDAKRAIVALKWKGIELRGIEFDLLLASYLLNPSQSTEDVASVAKTKQYMAVQSDWAVYGKGAKQTVPDENVLAEHLVRKAAAIRALEKELIHDLQENEQYALFTDLELPLSSVLAEMEFTGVKVDVERLKEMGEELTEQLRQVEQEIYKLAGQRFNINSPKQLGVILFEKLQLPVLKKTKTGYSTSADVLEKLARQHEIVRKILHYRQLGKLQSTYIEGLLKVVHRDTHKVHTIFNQALTQTGRLSSTEPNLQNIPIRLEEGRKIRQAFVPSKPDWVIFSADYSQIELRVLAHLANDENLIDAFRHDLDIHTKTAMDIFHVTADEVTPNMRRQAKAVNFGIVYGISDYGLSQRLNITRKEAAEFIRRYFESFPGVKQYMENIVKEAKQKGYVTTLLHRRRYLPDITSRNRNLRSFAERTAMNTPIQGSAADIIKKAMIDLARRLKREKLQARMLLQVHDELILEAPREEVERLVQIVPEVMENAVQLTVPLKVDYHYGPTWYDAK

SEQ ID NO: 249 - DNA, 1812 bp, synthetic construct
  misc_feature 1..1812: note = Variant of DNA polymerase
  source 1..1812: mol_type = other DNA
atgcatcaccatcaccatcacggtggcagcggtatggttgcaccacagaccaaaaaagaaatggccgtactgccgaacatcaattatacaattgtggaggaagtcaccgaaccgattctcgcggatcgttcggcgttagtggttgaggttctggggtccaactaccataaggctccgatcctgggctttgccctggccaatgaacacggtaacttcttcattcgcactgacacggctctttcttctccgctgtttaccgcgtggctggaggatgagagcaagaagaaatcagtattcgacgctaaacgcgcaatcgtggccctgaaatggaaaggcattgaattacgtggcatcgaatttgacttgttgctggcttcatatctcctgaatccctcgcaaagcacggaagatgtcgcaagcgtggccaagaccaaacagtacatggcagtacagagtgattgggcagtctatggaaaaggtgcgaaacaaacggtgccagatgaaaacgttttagccgaacatctggtgcgtaaagctgctgcaattcgcgccctggagaaagaactgatccacgatttgcaggaaaatgaacaatacgccctgtttactgaccttgaattacctctgtcctcggtcctggcagagatggaatttaccggtgtgaaagtagatgttgaacgcctgaaagaaatgggcgaggagctcacagaacaactgcgccaagtggagcaggaaatctataagttagctggccaagagttcaacattaacagccctaaacaactgggtgtcattctgtttgaaaaattacagcttcccgtcctgaagaagacgaagaccggctatagtacgagtgctgatgtgctcgagaaacttgcccgtcagcatgaaatcgtccgcaaaattcttcactaccgtcagctcggtaaactgcaatccacatatattgaagggctgctgaaagttgtacatcgcgacacccataaagtccacaccatcttcaaccaggccctgactcaaaccgggcgcctgtcaagcaccgaacctaatctccagaacatcccaattcgtctggaagaaggccgcaaaattcgccaagcatttgtgccatcgaaacctgactgggttatctttagcgcagattactcacagattgagctccgtgttctcgcacacctggcaaacgatgaaaatctgatcgatgcttttcgtcatgacctcgacatccatacgaagacagccatggatattttccatgtaacagcagatgaagttacccccaatatgcgtcgccaagcaaaagccgtgaacttcggtattgtctatgggatctctgattacggtctgagtcagcgtcttggcatcacgcgcaaagaagccgccgaatttattcgtcgttatttcgaaagctttcctggcgttaaacagtacatggagaatattgtaaaagaagccaaacagaaaggatacgtcaccacccttttacaccgccgccgctatctgccagacatccattctcgtaatcgcaacttacgttcattcgcagaacgcacggccatgaacaccccaattcaaggatcagccgccgacatcatcaagaaggcaatgattgatttagctgatcgtctgaaaaaagagaaacttcaagctcgtatgctgctccaggttcatgacgaactgattcttgaagctcctcgtgaggaagtcgaacgcctgcagcagattgtacccgaggtcatggagaacgccatccagttaaccgtcccactgaaagttgattatcactacggtcctacgtggtacgacgctaag

SEQ ID NO: 250 - protein, 604 aa, synthetic construct
  REGION 1..604: note = Variant of DNA polymerase
MHHHHHHGGSGMVAPQTKKEMAVLPNINYTIVEEVTEPILADRSALVVEVLGSNYHKAPILGFALANEHGNFFIRTDTALSSPLFTAWLEDESKKKSVFDAKRAIVALKWKGIELRGIEFDLLLASYLLNPSQSTEDVASVAKTKQYMAVQSDWAVYGKGAKQTVPDENVLAEHLVRKAAAIRALEKELIHDLQENEQYALFTDLELPLSSVLAEMEFTGVKVDVERLKEMGEELTEQLRQVEQEIYKLAGQEFNINSPKQLGVILFEKLQLPVLKKTKTGYSTSADVLEKLARQHEIVRKILHYRQLGKLQSTYIEGLLKVVHRDTHKVHTIFNQALTQTGRLSSTEPNLQNIPIRLEEGRKIRQAFVPSKPDWVIFSADYSQIELRVLAHLANDENLIDAFRHDLDIHTKTAMDIFHVTADEVTPNMRRQAKAVNFGIVYGISDYGLSQRLGITRKEAAEFIRRYFESFPGVKQYMENIVKEAKQKGYVTTLLHRRRYLPDIHSRNRNLRSFAERTAMNTPIQGSAADIIKKAMIDLADRLKKEKLQARMLLQVHDELILEAPREEVERLQQIVPEVMENAIQLTVPLKVDYHYGPTWYDAK

SEQ ID NO: 251 - DNA, 1812 bp, synthetic construct
  misc_feature 1..1812: note = Variant of DNA polymerase
  source 1..1812: mol_type = other DNA
atgcatcaccatcaccatcacggtggcagcggtatggttgcaccacagaccaaaaaagaagaggccgtactgccgaacatcaattatacaattgtggaggaagtcaccgaaccgattctcgcggatcgttcggcgttagtggttgaggttctggggtccaactaccataaggctccgatcctgggctttgccctggccaatgaacacggtaacttcttcattcgcactgacacggctctttcttctccgctgtttaccgcgtggctggaggatgagagcaagaagaaatcagtattcgacgctaaacgcgcaatcgtggccctgaaatggaaaggcattgaattacgtggcatcgaatttgacttgttgctggcttcatatctcctgaatccctcgcaaagcacggaagatgtcgcaagcgtggccaagaccaaacagtacatggcagtacagagtgattgggcagtctatggaaaaggtgcgaaacaaacggtgccagatgaaaacgttttagccgaacatctggtgcgtaaagctgctgcaattcgcgccctggagaaagaactgatccacgatttgcaggaaaatgaacaatacgccctgtttactgaccttgaattacctctgtcctcggtcctggcagagatggaatttaccggtgtgaaagtagatgttgaacgcctgaaagaaatgggcgaggagctcacagaacaactgcgccaagtggagcaggaaatctataagttagctggccaacgcttcaacattaacagccctaaacaactgggtgtcattctgtttgaaaaattacagcttcccgtcctgaagaagacgaagaccggctatagtacgagtgctgatgtgctcgagaaacttgcccgtcagcatgaaatcgtccgcaaaattcttcactaccgtcagctcggtaaactgcaatccacatatattgaagggctgctgaaagttgtacatcgcgacacccataaagtccacaccatcttcaaccaggccctgactcaaaccgggcgcctgtcaagcaccgaacctaatctccagaacatcccaattcgtctggaagaaggccgcaaaattcgccaagcatttgtgccatcgaaacctgactgggttatctttagcgcagattactcacagattgagctccgtgttctcgcacacctggcaaacgatgaaaatctgatcgatgcttttcgtcatgaccttgacatccatacgaagacagccatggatattttccatgtaacagcagatgaagttacccccaatatgcgtcgccaagcaaaagccgtgaacttcggtattgtctatgggatctctgattacggtctgagtcagcgtcttggcatcccgcgcaaagaagccgccgaatttattcgtcgttatttcgaaagctttcccggcgttaaacagtacatggagaatattgtaaaagaagccaaacagaaaggatacgtcaccacccttttacaccgccgccgctatctgccagacatccattctcgtaatcgcaacttacgttcattcgcagaacgcacggccatgaacaccccaattcaaggatcagccgccgacatcatcaagaaggcaatgattgatttagctgatcgtctgaaacgcgagaaacttcaagctcgtatgctgctccaggttcatgacgaactgattcttgaagctcctcgtgaggaagtcgaacgcctgcagcagattgtacccgaggtcatggagaacgccatccagttaaccgtcccactgaaagttgattatcactacggtcctacgtggtacgacgctaag

SEQ ID NO: 252 - protein, 604 aa, synthetic construct
  REGION 1..604: note = Variant of DNA polymerase
MHHHHHHGGSGMVAPQTKKEEAVLPNINYTIVEEVTEPILADRSALVVEVLGSNYHKAPILGFALANEHGNFFIRTDTALSSPLFTAWLEDESKKKSVFDAKRAIVALKWKGIELRGIEFDLLLASYLLNPSQSTEDVASVAKTKQYMAVQSDWAVYGKGAKQTVPDENVLAEHLVRKAAAIRALEKELIHDLQENEQYALFTDLELPLSSVLAEMEFTGVKVDVERLKEMGEELTEQLRQVEQEIYKLAGQRFNINSPKQLGVILFEKLQLPVLKKTKTGYSTSADVLEKLARQHEIVRKILHYRQLGKLQSTYIEGLLKVVHRDTHKVHTIFNQALTQTGRLSSTEPNLQNIPIRLEEGRKIRQAFVPSKPDWVIFSADYSQIELRVLAHLANDENLIDAFRHDLDIHTKTAMDIFHVTADEVTPNMRRQAKAVNFGIVYGISDYGLSQRLGIPRKEAAEFIRRYFESFPGVKQYMENIVKEAKQKGYVTTLLHRRRYLPDIHSRNRNLRSFAERTAMNTPIQGSAADIIKKAMIDLADRLKREKLQARMLLQVHDELILEAPREEVERLQQIVPEVMENAIQLTVPLKVDYHYGPTWYDAK

SEQ ID NO: 253 - DNA, 1812 bp, synthetic construct
  misc_feature 1..1812: note = Variant of DNA polymerase
  source 1..1812: mol_type = other DNA
atgcatcaccatcaccatcacggtggcagcggtatggttgcaccacagaccaaaaaagaaatggccgtactgccgaacatcaattatacaattgtggaggaagtcaccgaaccgattctcgcggatcgttcggcgttagtggttgaggttctggggtccaactaccataaggctccgatcctgggctttgccctggccaatgaacacggtaacttcttcattcgcactgacacggctctttcttctccgctgtttaccgcgtggctggaggatgagagcaagaagaaatcagtattcgacgctaaacgcgcaatcgtggccctgaaatggaaaggcattgaattacgtggcatcgaatttgacttgttgctggcttcatatctcctgaatccctcgcaaagcacggaagatgtcgcaagcgtggccaagaccaaacagtacatggcagtacagagtgattgggcagtctatggaaaaggtgcgaaacaaacggtgccagatgaaaacgttttagccgaacatctggtgcgtaaagctgctgcaattcgcgccctggagaaagaactgatccacgatttgcaggaaaatgaacaatacgccctgtttactgaccttgaattacctctgtcctcggtcctggcagagatggaatttaccggtgtgaaagtagatgttgaacgcctgaaagaaatgggcgaggagctcacagaacaactgcgccaagtggagcaggaaatctataagttagctggccaacgcttcaacattaacagccctaaacaactgggtgtcattctgtttgaaaaattacagcttcccgtcctgaagaagacgaagaccggctatagtacgagtgctgatgtgctcgagaaacttgcccgtcagcatgaaatcgtccgcaaaattcttcactaccgtcagctcggtaaactgcaatccacatatattgaagggctgctgaaagttgtacatcgcgacacccataaagtccacaccatcttcaaccaggccctgactcaaaccgggcgcctgtcaagcaccgaacctaatctccagaacatcccaattcgtctggaagaaggccgcaaaattcgccaagcatttgtgccatcgaaacctgactgggttatctttagcgcagattactcacagattgagctccgtgttctcgcacacctggcaaacgatgaaaatctgatcgatgcttttcgtcatgaccttgacatccatacgaagacagccatggatattttccatgtaacagcagatgaagttacccccaatatgcgtcgccaagcaaaagccgtgaacttcggtattgtctatgggatctctgattacggtctgagtcagcgtcttggcatcccgcgcaaagaagccgccgaatttattcgtcgttatttcgaaagctttcccggcgttaaacagtacatggagaatattgtaaaagaagccaaacagaaaggatacgtcaccacccttttacaccgccgccgctatctgccagacatcacctctcgtaatcgcaacttacgttcattcgcagaacgcacggccatgaacaccccaattcaaggatcagccgccgacatcatcaagaaggcaatgattgatttagctgaccgtctgaaacgcgagaaacttcaagctcgtatgctgctccaggttcatgacgaactgattcttgaagctcctcgtgaggaagtcgaacgcctggttcagattgtacccgaggtcatggagaacgccatccagttaaccgtcccactgaaagttgattatcactacggtcctacgtggtacgacgctaag

SEQ ID NO: 254 - protein, 604 aa, synthetic construct
  REGION 1..604: note = Variant of DNA polymerase
MHHHHHHGGSGMVAPQTKKEMAVLPNINYTIVEEVTEPILADRSALVVEVLGSNYHKAPILGFALANEHGNFFIRTDTALSSPLFTAWLEDESKKKSVFDAKRAIVALKWKGIELRGIEFDLLLASYLLNPSQSTEDVASVAKTKQYMAVQSDWAVYGKGAKQTVPDENVLAEHLVRKAAAIRALEKELIHDLQENEQYALFTDLELPLSSVLAEMEFTGVKVDVERLKEMGEELTEQLRQVEQEIYKLAGQRFNINSPKQLGVILFEKLQLPVLKKTKTGYSTSADVLEKLARQHEIVRKILHYRQLGKLQSTYIEGLLKVVHRDTHKVHTIFNQALTQTGRLSSTEPNLQNIPIRLEEGRKIRQAFVPSKPDWVIFSADYSQIELRVLAHLANDENLIDAFRHDLDIHTKTAMDIFHVTADEVTPNMRRQAKAVNFGIVYGISDYGLSQRLGIPRKEAAEFIRRYFESFPGVKQYMENIVKEAKQKGYVTTLLHRRRYLPDITSRNRNLRSFAERTAMNTPIQGSAADIIKKAMIDLADRLKREKLQARMLLQVHDELILEAPREEVERLVQIVPEVMENAIQLTVPLKVDYHYGPTWYDAK

SEQ ID NO: 255 - DNA, 1812 bp, synthetic construct
  misc_feature 1..1812: note = Variant of DNA polymerase
  source 1..1812: mol_type = other DNA
atgcatcaccatcaccatcacggtggcagcggtatggttgcaccacagaccaaaaaagaagaggccgtactgccgaacatcaattatacaattgtggaggaagtcaccgaaccgattctcgcggatcgttcggcgttagtggttgaggttctggggtccaactaccataaggctccgatcctgggctttgccctggccaatgaacacggtaacttcttcattcgcactgacacggctctttcttctccgctgtttaccgcgtggctggaggatgagagcaagaagaaatcagtattcgacgctaaacgcgcaatcgtggccctgaaatggaaaggcattgaattacgtggcatcgaatttgacttgttgctggcttcatatctcctgaatccctcgcaaagcacggaagatgtcgcaagcgtggccaagaccaaacagtacatggcagtacagagcgatgaagcagtctatggaaaaggtgcgaaacaaacggtgccagatgaaaacgttttagccgaacatctggtgcgtaaagctgctgcaattcgcgccctggagaaagaactgatccacgatttgcaggaaaatgaacaatacgccctgtttactgaccttgaattacctctgtcctcggtcctggcagagatggaatttaccggtgtgaaagtagatgttgaacgcctgaaagaaatgggcgaggagctcacagaacaactgcgccaagtggagcaggaaatctataagttagctggccaagagttcaacattaacagccctaaacaactgggtgtcattctgtttgaaaaattacagcttcccgtcctgaagaagacgaagaccggctatagtacgagtgctgatgtgctcgagaaacttgcccgtcagcatgaaatcgtccgcaaaattcttcactaccgtcagctcggtaaactgcaatccacatatattgaagggctgctgaaagttgtacatcgcgacacccataaagtccacaccatcttcaaccaggccctgactcaaaccgggcgcctgtcaagcaccgaacctaatctccagaacatcccaattcgtctggaagaaggccgcaaaattcgccaagcatttgtgccatcgaaacctgactgggttatctttagcgcagattactcacagattgagctccgtgttctcgcacacctggcaaacgatgaaaatctgatcgatgcttttcgccatgaccttgacatccatacgaagacagccatggatattttccatgtaacagcagatgaagttacccccaatatgcgtcgccaagcaaaagccgtgaacttcggtattgtctatgggatctctgattacggtctgagtcagcgtcttggcatcccgcgcaaagaagccgccgaatttattcgtcgttatttcgaaagctttcccggcgttaaacagtacatggagaatattgtaaaagaagccaaacagaaaggatacgtcaccacccttttacaccgccgccgctatctgccagacatccattctcgtaatcgcaacttacgttcattcgcagaacgcacggccatgaacaccccaattcaaggatcagccgccgacatcatcaagaaggcaatgattgatttagctcgtcgtctgaaacgcgagaaacttcaagctcgtatgctgctccaggttcatgacgaactgattcttgaagctcctcgtgaggaagtcgaacgcctgcagcagattgtacccgaggtcatggagaacgccgtccagttaaccgtcccactgaaagttgattatcactacggtcctacgtggtacgacgctaag

SEQ ID NO: 256 - protein, 604 aa, synthetic construct
  REGION 1..604: note = Variant of DNA polymerase
MHHHHHHGGSGMVAPQTKKEEAVLPNINYTIVEEVTEPILADRSALVVEVLGSNYHKAPILGFALANEHGNFFIRTDTALSSPLFTAWLEDESKKKSVFDAKRAIVALKWKGIELRGIEFDLLLASYLLNPSQSTEDVASVAKTKQYMAVQSDEAVYGKGAKQTVPDENVLAEHLVRKAAAIRALEKELIHDLQENEQYALFTDLELPLSSVLAEMEFTGVKVDVERLKEMGEELTEQLRQVEQEIYKLAGQEFNINSPKQLGVILFEKLQLPVLKKTKTGYSTSADVLEKLARQHEIVRKILHYRQLGKLQSTYIEGLLKVVHRDTHKVHTIFNQALTQTGRLSSTEPNLQNIPIRLEEGRKIRQAFVPSKPDWVIFSADYSQIELRVLAHLANDENLIDAFRHDLDIHTKTAMDIFHVTADEVTPNMRRQAKAVNFGIVYGISDYGLSQRLGIPRKEAAEFIRRYFESFPGVKQYMENIVKEAKQKGYVTTLLHRRRYLPDIHSRNRNLRSFAERTAMNTPIQGSAADIIKKAMIDLARRLKREKLQARMLLQVHDELILEAPREEVERLQQIVPEVMENAVQLTVPLKVDYHYGPTWYDAK

SEQ ID NO: 257 - DNA, 1812 bp, synthetic construct
  misc_feature 1..1812: note = Variant of DNA polymerase
  source 1..1812: mol_type = other DNA
atgcatcaccatcaccatcacggtggcagcggtatggttgcaccacagaccaaaaaagaagaggccgtactgccgaacatcaattatacaattgtggaggaagtcaccgaaccgattctcgcggatcgttcggcgttagtggttgaggttctggggtccaactaccataaggctccgatcctgggctttgccctggccaatgaacacggtaacttcttcattcgcactgacacggctctttcttctccgctgtttaccgcgtggctggaggatgagagcaagaagaaatcagtattcgacgctaaacgcgcaatcgtggccctgaaatggaaaggcattgaattacgtggcatcgaatttgacttgttgctggcttcatatctcctgaatccctcgcaaagcacggaagatgtcgcaagcgtggccaagaccaaacagtacatggcagtacagagtgatgaggcagtctatggaaaaggtgcgaaacaaacggtgccagatgaaaacgttttagccgaacatctggtgcgtaaagctgctgcaattcgcgccctggagaaagaactgatccacgatttgcaggaaaatgaacaatacgccctgtttactgaccttgaattacctctgtcctcggtcctggcagagatggaatttaccggtgtgaaagtagatgttgaacgcctgaaagaaatgggcgaggagctcacagaacaactgcgccaagtggagcaggaaatctataagttagctggccaagagttcaacattaacagccctaaacaactgggtgtcattctgtttgaaaaattacagcttcccgtcctgaagaagacgaagaccggctatagtacgagtgctgatgtgctcgagaaacttgcccgtcagcatgaaatcgtccgcaaaattcttcactaccgtcagctcggtaaactgcaatccacatatattgaagggctgctgaaagttgtacatcgcgacacccataaagtccacaccatcttcaaccaggccctgactcaaaccgggcgcctgtcaagcaccgaacctaatctccagaacatcccaattcgtctggaagaaggccgcaaaattcgccaagcatttgtgccatcgaaacctgactgggttatctttagcgcagattactcacagattgagctccgtgttctcgcacacctggcaaacgatgaaaatctgatcgatgcttttcgtcatgaccttgacatccatacgaagacagccatggatattttccatgtaacagcagatgaagttacccccaatatgcgtcgccaagcaaaagccgtgaacttcggtattgtctatgggatctctgattacggtctgagtcagcgtcttggcatcccgcgcaaagaagccgccgaatttattcgtcgttatttcgaaagctttcccggcgttaaacagtacatggagaatattgtaaaagaagccaaacagaaaggatacgtcaccacccttttacaccgccgccgctatctgccagacatccattctcgtaatcgcaacttacgttcattcgcagaacgcacggccatgaacaccccaattcaaggatcagccgccgacatcatcaagaaggcaatgattgatttagctcgtcgtctgaaacgcgagaaacttcaagctcgtatgctgctccaggttcatgacgaactgattcttgaagctcctcgtgaggaagtcgaacgcctggttcagattgtacccgaggtcatggagaacgccatccagttaaccgtcccactgaaagttgattatcactacggtcctacgtggtacgacgctaag

SEQ ID NO: 258 - protein, 604 aa, synthetic construct
  REGION 1..604: note = Variant of DNA polymerase
MHHHHHHGGSGMVAPQTKKEEAVLPNINYTIVEEVTEPILADRSALVVEVLGSNYHKAPILGFALANEHGNFFIRTDTALSSPLFTAWLEDESKKKSVFDAKRAIVALKWKGIELRGIEFDLLLASYLLNPSQSTEDVASVAKTKQYMAVQSDEAVYGKGAKQTVPDENVLAEHLVRKAAAIRALEKELIHDLQENEQYALFTDLELPLSSVLAEMEFTGVKVDVERLKEMGEELTEQLRQVEQEIYKLAGQEFNINSPKQLGVILFEKLQLPVLKKTKTGYSTSADVLEKLARQHEIVRKILHYRQLGKLQSTYIEGLLKVVHRDTHKVHTIFNQALTQTGRLSSTEPNLQNIPIRLEEGRKIRQAFVPSKPDWVIFSADYSQIELRVLAHLANDENLIDAFRHDLDIHTKTAMDIFHVTADEVTPNMRRQAKAVNFGIVYGISDYGLSQRLGIPRKEAAEFIRRYFESFPGVKQYMENIVKEAKQKGYVTTLLHRRRYLPDIHSRNRNLRSFAERTAMNTPIQGSAADIIKKAMIDLARRLKREKLQARMLLQVHDELILEAPREEVERLVQIVPEVMENAIQLTVPLKVDYHYGPTWYDAK

SEQ ID NO: 259 - DNA, 1812 bp, synthetic construct
  misc_feature 1..1812: note = Variant of DNA polymerase
  source 1..1812: mol_type = other DNA
atgcatcaccatcaccatcacggtggcagcggtatggttgcaccacagaccaaaaaagaagaggccgtactgccgaacatcaattatacaattgtggaggaagtcaccgaaccgattctcgcggatcgttcggcgttagtggttgaggttctggggtccaactaccataaggctccgatcctgggctttgccctggccaatgaacacggtaacttcttcattcgcactgacacggctctttcttctccgctgtttaccgcgtggctggaggatgagagcaagaagaaatcagtattcgacgctaaacgcgcaatcgtggccctgaaatggaaaggcattgaattacgtggcatcgaatttgacttgttgctggcttcatatctcctgaatccctcgcaaagcacggaagatgtcgcaagcgtggccaagaccaaacagtacatggcagtacagagtgattgggcagtctatggaaaaggtgcgaaacaaacggtgccagatgaaaacgttttagccgaacatctggtgcgtaaagctgctgcaattcgcgccctggagaaagaactgatccacgatttgcaggaaaatgaacaatacgccctgtttactgaccttgaattacctctgtcctcggtcctggcagagatggaatttaccggtgtgaaagtagatgttgaacgcctgaaagaaatgggcgaggagctcacagaacaactgcgccaagtggagcaggaaatctataagttagctggccaacgcttcaacattaacagccctaaacaactgggtgtcattctgtttgaaaaattacagcttcccgtcctgaagaagacgaagaccggctatagtacgagtgctgatgtgctcgagaaacttgcccgtcagcatgaaatcgtccgcaaaattcttcactaccgtcagctcggtaaactgcaatccacatatattgaagggctgctgaaagttgtacatcgcgacacccataaagtccacaccatcttcaaccaggccctgactcaaaccgggcgcctgtcaagcaccgaacctaatctccagaacatcccaattcgtctggaagaaggccgcaaaattcgccaagcatttgtgccatcgaaacctgactgggttatctttagcgcagattactcacagattgagctccgtgttctcgcacacctggcaaacgatgaaaatctgatcgatgcttttcgtcatgaccttgacatccatacgaagacagccatggatattttccatgtaacagcagatgaagttacccccaatatgcgtcgccaagcaaaagccgtgaacttcggtattgtctatgggatctctgattacggtctgagtcagcgtcttggcatcccgcgcaaagaagccgccgaatttattcgtcgttatttcgaaagctttcccggcgttaaacagtacatggagaatattgtaaaagaagccaaacagaaaggatacgtcaccacccttttacaccgccgccgctatctgccagacatcacctctcgtaatcgcaacttacgttcattcgcagaacgcacggccatgaacaccccaattcaaggatcagccgccgacatcatcaagaaggcaatgattgatttagctgatcgtctgaaacgcgagaaacttcaagctcgtatgctgctccaggttcatgacgaactgattcttgaagctcctcgtgaggaagtcgaacgcctgcagcagattgtacccgaggtcatggagaacgccatccagttaaccgtcccactgaaagttgattatcactacggtcctacgtggtacgacgctaag

SEQ ID NO: 260 - protein, 604 aa, synthetic construct
  REGION 1..604: note = Variant of DNA polymerase
MHHHHHHGGSGMVAPQTKKEEAVLPNINYTIVEEVTEPILADRSALVVEVLGSNYHKAPILGFALANEHGNFFIRTDTALSSPLFTAWLEDESKKKSVFDAKRAIVALKWKGIELRGIEFDLLLASYLLNPSQSTEDVASVAKTKQYMAVQSDWAVYGKGAKQTVPDENVLAEHLVRKAAAIRALEKELIHDLQENEQYALFTDLELPLSSVLAEMEFTGVKVDVERLKEMGEELTEQLRQVEQEIYKLAGQRFNINSPKQLGVILFEKLQLPVLKKTKTGYSTSADVLEKLARQHEIVRKILHYRQLGKLQSTYIEGLLKVVHRDTHKVHTIFNQALTQTGRLSSTEPNLQNIPIRLEEGRKIRQAFVPSKPDWVIFSADYSQIELRVLAHLANDENLIDAFRHDLDIHTKTAMDIFHVTADEVTPNMRRQAKAVNFGIVYGISDYGLSQRLGIPRKEAAEFIRRYFESFPGVKQYMENIVKEAKQKGYVTTLLHRRRYLPDITSRNRNLRSFAERTAMNTPIQGSAADIIKKAMIDLADRLKREKLQARMLLQVHDELILEAPREEVERLQQIVPEVMENAIQLTVPLKVDYHYGPTWYDAK

SEQ ID NO: 261 - DNA, 1812 bp, synthetic construct
  misc_feature 1..1812: note = Variant of DNA polymerase
  source 1..1812: mol_type = other DNA
atgcatcaccatcaccatcacggtggcagcggtatggttgcaccacagaccaaaaaagaagaagccgtactgccgaacatcaattatacaattgtggaggaagtcaccgaaccgattctcgcggatcgttcggcgttagtggttgaggttctggggtccaactaccataaggctccgatcctgggctttgccctggccaatgaacacggtaacttcttcattcgcactgacacggctctttcttctccgctgtttaccgcgtggctggaggatgagagcaagaagaaatcagtattcgacgctaaacgcgcaatcgtggccctgaaatggaaaggcattgaattacgtggcatcgaatttgacttgttgctggcttcatatctcctgaatccctcgcaaagcacggaagatgtcgcaagcgtggccaagaccaaacagtacatggcagtacagagtgattgggcagtctatggaaaaggtgcgaaacaaacggtgccagatgaaaacgttttagccgaacatctggtgcgtaaagctgctgcaattcgcgccctggagaaagaactgatccacgatttgcaggaaaatgaacaatacgccctgtttactgaccttgaattacctctgtcctcggtcctggcagagatggaatttaccggtgtgaaagtagatgttgaacgcctgaaagaaatgggcgaggagctcacagaacaactgcgccaagtggagcaggaaatctataagttagctggccaagagttcaacattaacagccctaaacaactgggtgtcattctgtttgaaaaattacagcttcccgtcctgaagaagacgaagaccggctatagtacgagtgctgatgtgctcgagaaacttgcccgtcagcatgaaatcgtccgcaaaattcttcactaccgtcagctcggtaaactgcaatccacatatattgaagggctgctgaaagttgtacatcgcgacacccataaagtccacaccatcttcaaccaggccctgactcaaaccgggcgcctgtcaagcaccgaacctaatctccagaacatcccaattcgtctggaagaaggccgcaaaattcgccaagcatttgtgccatcgaaacctgactgggttatctttagcgcagattactcacagattgagctccgtgttctcgcacacctggcaaacgatgaaaatctgatcgatgcttttcgtcatgaccttgacatccatacgaagacagccatggatattttccatgtaacagcagatgaagttacccccaatatgcgtcgccaagcaaaagccgtgaacttcggtattgtctatgggatctctgattacggtctgagtcagcgtcttggcatcccgcgcaaagaagccgccgaatttattcgtcgttatttcgaaagctttcccggcgttaaacagtacatggagaatattgtaaaagaagccaaacagaaaggatacgtcaccacccttttacaccgccgccgctatctgccagacatcacctctcgtaatcgtaacttacgttcattcgcagaacgcacggccatgaacaccccaattcaaggatcagccgccgacatcatcaagaaggcaatgattgatttagctgatcgtctgaaacgcgagaaacttcaagctcgtatgctgctccaggttcatgacgaactgattcttgaagctcctcgtgaggaagtcgaacgcctggttcagattgtacccgaggtcatggagaacgccatccagttaaccgtcccactgaaagttgattatcactacggtcctacgtggtacgacgctaag

SEQ ID NO: 262 - protein, 604 aa, synthetic construct
  REGION 1..604: note = Variant of DNA polymerase
MHHHHHHGGSGMVAPQTKKEEAVLPNINYTIVEEVTEPILADRSALVVEVLGSNYHKAPILGFALANEHGNFFIRTDTALSSPLFTAWLEDESKKKSVFDAKRAIVALKWKGIELRGIEFDLLLASYLLNPSQSTEDVASVAKTKQYMAVQSDWAVYGKGAKQTVPDENVLAEHLVRKAAAIRALEKELIHDLQENEQYALFTDLELPLSSVLAEMEFTGVKVDVERLKEMGEELTEQLRQVEQEIYKLAGQEFNINSPKQLGVILFEKLQLPVLKKTKTGYSTSADVLEKLARQHEIVRKILHYRQLGKLQSTYIEGLLKVVHRDTHKVHTIFNQALTQTGRLSSTEPNLQNIPIRLEEGRKIRQAFVPSKPDWVIFSADYSQIELRVLAHLANDENLIDAFRHDLDIHTKTAMDIFHVTADEVTPNMRRQAKAVNFGIVYGISDYGLSQRLGIPRKEAAEFIRRYFESFPGVKQYMENIVKEAKQKGYVTTLLHRRRYLPDITSRNRNLRSFAERTAMNTPIQGSAADIIKKAMIDLADRLKREKLQARMLLQVHDELILEAPREEVERLVQIVPEVMENAIQLTVPLKVDYHYGPTWYDAK

SEQ ID NO: 263 - DNA, 1812 bp, synthetic construct
  misc_feature 1..1812: note = Variant of DNA polymerase
  source 1..1812: mol_type = other DNA
atgcatcaccatcaccatcacggtggcagcggtatggttgcaccacagaccaaaaaagaagaggccgtactgccgaacatcaattatacaattgtggaggaagtcaccgaaccgattctcgcggatcgttcggcgttagtggttgaggttctggggtccaactaccataaggctccgatcctgggctttgccctggccaatgaacacggtaacttcttcattcgcactgacacggctctttcttctccgctgtttaccgcgtggctggaggatgagagcaagaagaaatcagtattcgacgctaaacgcgcaatcgtggccctgaaatggaaaggcattgaattacgtggcatcgaatttgacttgttgctggcttcatatctcctgaatccctcgcaaagcacggaagatgtcgcaagcgtggccaagaccaaacagtacatggcagtacagagtgatgaggcagtctatggaaaaggtgcgaaacaaacggtgccagatgaaaacgttttagccgaacatctggtgcgtaaagctgctgcaattcgcgccctggagaaagaactgatccacgatttgcaggaaaatgaacaatacgccctgtttactgaccttgaattacctctgtcctcggtcctggcagagatggaatttaccggtgtgaaagtagatgttgaacgcctgaaagaaatgggcgaggagctcacagaacaactgcgccaagtggagcaggaaatctataagttagctggccaagagttcaacattaacagccctaaacaactgggtgtcattctgtttgaaaaattacagcttcccgtcctgaagaagacgaagaccggctatagtacgagtgctgatgtgctcgagaaacttgcccgtcagcatgaaatcgtccgcaaaattcttcactaccgtcagctcggtaaactgcaatccacatatattgaagggctgctgaaagttgtacatcgcgacacccataaagtccacaccatcttcaaccaggccctgactcaaaccgggcgcctgtcaagcaccgaacctaatctccagaacatcccaattcgtctggaagaaggccgcaaaattcgccaagcatttgtgccatcgaaacctgactgggttatctttagcgcagattactcacagattgagctccgtgttctcgcacacctggcaaacgatgaaaatctgatcgatgcttttcgtcatgaccttgacatccatacgaagacagccatggatattttccatgtaacagcagatgaagttacccccaatatgcgtcgccaagcaaaagccgtgaacttcggtattgtctatgggatctctgattacggtctgagtcagcgtcttggcatcacgcgcaaagaagccgccgaatttattcgtcgttatttcgaaagctttcccggcgttaaacagtacatggagaatattgtaaaagaagccaaacagaaaggatacgtcaccacccttttacaccgccgccgctatctgccagacatcacctctcgtaatcgcaacttacgttcattcgcagaacgcacggccatgaacaccccaattcaaggatcagccgccgacatcatcaagaaggcaatgattgatttagctgatcgtctgaaaaaagagaaacttcaagctcgtatgctgctccaggttcatgacgaactgattcttgaagctcctcgtgaggaagtcgaacgcctggttcagattgtacccgaggtcatggagaacgccatccagttaaccgtcccactgaaagttgattatcactacggtcctacgtggtacgacgctaag

SEQ ID NO: 264 - protein, 604 aa, synthetic construct
  REGION 1..604: note = Variant of DNA polymerase
MHHHHHHGGSGMVAPQTKKEEAVLPNINYTIVEEVTEPILADRSALVVEVLGSNYHKAPILGFALANEHGNFFIRTDTALSSPLFTAWLEDESKKKSVFDAKRAIVALKWKGIELRGIEFDLLLASYLLNPSQSTEDVASVAKTKQYMAVQSDEAVYGKGAKQTVPDENVLAEHLVRKAAAIRALEKELIHDLQENEQYALFTDLELPLSSVLAEMEFTGVKVDVERLKEMGEELTEQLRQVEQEIYKLAGQEFNINSPKQLGVILFEKLQLPVLKKTKTGYSTSADVLEKLARQHEIVRKILHYRQLGKLQSTYIEGLLKVVHRDTHKVHTIFNQALTQTGRLSSTEPNLQNIPIRLEEGRKIRQAFVPSKPDWVIFSADYSQIELRVLAHLANDENLIDAFRHDLDIHTKTAMDIFHVTADEVTPNMRRQAKAVNFGIVYGISDYGLSQRLGITRKEAAEFIRRYFESFPGVKQYMENIVKEAKQKGYVTTLLHRRRYLPDITSRNRNLRSFAERTAMNTPIQGSAADIIKKAMIDLADRLKKEKLQARMLLQVHDELILEAPREEVERLVQIVPEVMENAIQLTVPLKVDYHYGPTWYDAK

SEQ ID NO: 265 - DNA, 1812 bp, synthetic construct
  misc_feature 1..1812: note = Variant of DNA polymerase
  source 1..1812: mol_type = other DNA
atgcatcaccatcaccatcacggtggcagcggtatggttgcaccacagaccaaaaaagaagaagccgtactgccgaacatcaattatacaattgtggaggaagtcaccgaaccgattctcgcggatcgttcggcgttagtggttgaggttctggggtccaactaccataaggctccgatcctgggctttgccctggccaatgaacacggtaacttcttcattcgcactgacacggctctttcttctccgctgtttaccgcgtggctggaggatgagagcaagaagaaatcagtattcgacgctaaacgcgcaatcgtggccctgaaatggaaaggcattgaattacgtggcatcgaatttgacttgttgctggcttcatatctcctgaatccctcgcaaagcacggaagatgtcgcaagcgtggccaagaccaaacagtacatggcagtacagagtgatgaggcagtctatggaaaaggtgcgaaacaaacggtgccagatgaaaacgttttagccgaacatctggtgcgtaaagctgctgcaattcgcgccctggagaaagaactgatccacgatttgcaggaaaatgaacaatacgccctgtttactgaccttgaattacctctgtcctcggtcctggcagagatggaatttaccggtgtgaaagtagatgttgaacgcctgaaagaaatgggcgaggagctcacagaacaactgcgccaagtggagcaggaaatctataagttagctggccaacgcttcaacattaacagccctaaacaactgggtgtcattctgtttgaaaaattacagcttcccgtcctgaagaagacgaagaccggctatagtacgagtgctgatgtgctcgagaaacttgcccgtcagcatgaaatcgtccgcaaaattcttcactaccgtcagctcggtaaactgcaatccacatatattgaagggctgctgaaagttgtacatcgcgacacccataaagtccacaccatcttcaaccaggccctgactcaaaccgggcgcctgtcaagcaccgaacctaatctccagaacatcccaattcgtctggaagaaggccgcaaaattcgccaagcatttgtgccatcgaaacctgactgggttatctttagcgcagattactcacagattgagctccgtgttctcgcacacctggcaaacgatgaaaatctgatcgatgcttttcgtcatgaccttgacatccatacgaagacagccatggatattttccatgtaacagcagatgaagttacccccaatatgcgtcgccaagcaaaagccgtgaacttcggtattgtctatgggatctctgattacggtctgagtcagcgtcttggcatcacgcgcaaagaagccgccgaatttattcgtcgttatttcgaaagctttcccggcgttaaacagtacatggagaatattgtaaaagaagccaaacagaaaggatacgtcaccacccttttacaccgccgccgctatctgccagacatcacctctcgtaatcgtaacttacgttcattcgcagaacgcacggccatgaacaccccaattcaaggatcagccgccgacatcatcaagaaggcaatgattgatttagctgatcgtctgaaacgcgagaaacttcaagctcgtatgctgctccaggttcatgacgaactgattcttgaagctcctcgtgaggaagtcgaacgcctgcagcagattgtacccgaggtcatggagaacgccatccagttaaccgtcccactgaaagttgattatcactacggtcctacgtggtacgacgctaag

SEQ ID NO: 266 - protein, 604 aa, synthetic construct
  REGION 1..604: note = Variant of DNA polymerase
MHHHHHHGGSGMVAPQTKKEEAVLPNINYTIVEEVTEPILADRSALVVEVLGSNYHKAPILGFALANEHGNFFIRTDTALSSPLFTAWLEDESKKKSVFDAKRAIVALKWKGIELRGIEFDLLLASYLLNPSQSTEDVASVAKTKQYMAVQSDEAVYGKGAKQTVPDENVLAEHLVRKAAAIRALEKELIHDLQENEQYALFTDLELPLSSVLAEMEFTGVKVDVERLKEMGEELTEQLRQVEQEIYKLAGQRFNINSPKQLGVILFEKLQLPVLKKTKTGYSTSADVLEKLARQHEIVRKILHYRQLGKLQSTYIEGLLKVVHRDTHKVHTIFNQALTQTGRLSSTEPNLQNIPIRLEEGRKIRQAFVPSKPDWVIFSADYSQIELRVLAHLANDENLIDAFRHDLDIHTKTAMDIFHVTADEVTPNMRRQAKAVNFGIVYGISDYGLSQRLGITRKEAAEFIRRYFESFPGVKQYMENIVKEAKQKGYVTTLLHRRRYLPDITSRNRNLRSFAERTAMNTPIQGSAADIIKKAMIDLADRLKREKLQARMLLQVHDELILEAPREEVERLQQIVPEVMENAIQLTVPLKVDYHYGPTWYDAK

SEQ ID NO: 267 - DNA, 1812 bp, synthetic construct
  misc_feature 1..1812: note = Variant of DNA polymerase
  source 1..1812: mol_type = other DNA
atgcatcaccatcaccatcacggtggcagcggtatggttgcaccacagaccaaaaaagaagaggccgtactgccgaacatcaattatacaattgtggaggaagtcaccgaaccgattctcgcggatcgttcggcgttagtggttgaggttctggggtccaactaccataaggctccgatcctgggctttgccctggccaatgaacacggtaacttcttcattcgcactgacacggctctttcttctccgctgtttaccgcgtggctggaggatgagagcaagaagaaatcagtattcgacgctaaacgcgcaatcgtggccctgaaatggaaaggcattgaattacgtggcatcgaatttgacttgttgctggcttcatatctcctgaatccctcgcaaagcacggaagatgtcgcaagcgtggccaagaccaaacagtacatggcagtacagagtgattgggcagtctatggaaaaggtgcgaaacaaacggtgccagatgaaaacgttttagccgaacatctggtgcgtaaagctgctgcaattcgcgccctggagaaagaactgatccacgatttgcaggaaaatgaacaatacgccctgtttactgaccttgaattacctctgtcctcggtcctggcagagatggaatttaccggtgtgaaagtagatgttgaacgcctgaaagaaatgggcgaggagctcacagaacaactgcgccaagtggagcaggaaatctataagttagctggccaacgcttcaacattaacagccctaaacaactgggtgtcattctgtttgaaaaattacagcttcccgtcctgaagaagacgaagaccggctatagtacgagtgctgatgtgctcgagaaacttgcccgtcagcatgaaatcgtccgcaaaattcttcactaccgtcagctcggtaaactgcaatccacatatattgaagggctgctgaaagttgtacatcgcgacacccataaagtccacaccatcttcaaccaggccctgactcaaaccgggcgcctgtcaagcaccgaacctaatctccagaacatcccaattcgtctggaagaaggccgcaaaattcgccaagcatttgtgccatcgaaacctgactgggttatctttagcgcagattactcacagattgagctccgtgttctcgcacacctggcaaacgatgaaaatctgatcgatgcttttcgtcatgaccttgacatccatacgaagacagccatggatattttccatgtaacagcagatgaagttacccccaatatgcgtcgccaagcaaaagccgtgaacttcggtattgtctatgggatctctgattacggtctgagtcagcgtcttggcatcccgcgcaaagaagccgccgaatttattcgtcgttatttcgaaagctttcccggcgttaaacagtacatggagaatattgtaaaagaagccaaacagaaaggatacgtcaccacccttttacaccgccgccgctatctgccagacatcacctctcgtaatcgcaacttacgttcattcgcagaacgcacggccatgaacaccccaattcaaggatcagccgccgacatcatcaagaaggcaatgattgatttagctgatcgtctgaaaaaagagaaacttcaagctcgtatgctgctccaggttcatgacgaactgattcttgaagctcctcgtgaggaagtcgaacgcctggttcagattgtacccgaggtcatggagaacgccatccagttaaccgtcccactgaaagttgattatcactacggtcctacgtggtacgacgctaag

SEQ ID NO: 268 - protein, 604 aa, synthetic construct
  REGION 1..604: note = Variant of DNA polymerase
MHHHHHHGGSGMVAPQTKKEEAVLPNINYTIVEEVTEPILADRSALVVEVLGSNYHKAPILGFALANEHGNFFIRTDTALSSPLFTAWLEDESKKKSVFDAKRAIVALKWKGIELRGIEFDLLLASYLLNPSQSTEDVASVAKTKQYMAVQSDWAVYGKGAKQTVPDENVLAEHLVRKAAAIRALEKELIHDLQENEQYALFTDLELPLSSVLAEMEFTGVKVDVERLKEMGEELTEQLRQVEQEIYKLAGQRFNINSPKQLGVILFEKLQLPVLKKTKTGYSTSADVLEKLARQHEIVRKILHYRQLGKLQSTYIEGLLKVVHRDTHKVHTIFNQALTQTGRLSSTEPNLQNIPIRLEEGRKIRQAFVPSKPDWVIFSADYSQIELRVLAHLANDENLIDAFRHDLDIHTKTAMDIFHVTADEVTPNMRRQAKAVNFGIVYGISDYGLSQRLGIPRKEAAEFIRRYFESFPGVKQYMENIVKEAKQKGYVTTLLHRRRYLPDITSRNRNLRSFAERTAMNTPIQGSAADIIKKAMIDLADRLKKEKLQARMLLQVHDELILEAPREEVERLVQIVPEVMENAIQLTVPLKVDYHYGPTWYDAK

SEQ ID NO: 269 - DNA, 1812 bp, synthetic construct
  misc_feature 1..1812: note = Variant of DNA polymerase
  source 1..1812: mol_type = other DNA
atgcatcaccatcaccatcacggtggcagcggtatggttgcaccacagaccaaaaaagaaatggccgtactgccgaacatcaattatacaattgtggaggaagtcaccgaaccgattctcgcggatcgttcggcgttagtggttgaggttctggggtccaactaccataaggctccgatcctgggctttgccctggccaatgaacacggtaacttcttcattcgcactgacacggctctttcttctccgctgtttaccgcgtggctggaggatgagagcaagaagaaatcagtattcgacgctaaacgcgcaatcgtggccctgaaatggaaaggcattgaattacgtggcatcgaatttgacttgttgctggcttcatatctcctgaatccctcgcaaagcacggaagatgtcgcaagcgtggccaagaccaaacagtacatggcagtacagcgcgatgaggcagtctatggaaaaggtgcgaaacaaacggtgccagatgaaaacgttttagccgaacatctggtgcgtaaagctgctgcaattcgcgccctggagaaagaactgatccacgatttgcaggaaaatgaacaatacgccctgtttactgaccttgaattacctctgtcctcggtcctggcagagatggaatttaccggtgtgaaagtagatgttgaacgcctgaaagaaatgggcgaggagctcacagaacaactgcgccaagtggagcaggaaatctataagttagctggccaacgcttcaacattaacagccctaaacaactgggtgtcattctgtttgaaaaattacagcttcccgtcctgaagaagacgaagaccggctatagtacgagtgctgatgtgctcgagaaacttgcccgtcagcatgaaatcgtccgcaaaattcttcactaccgtcagctcggtaaactgcaatccacatatattgaagggctgctgaaagttgtacatcgcgacacccataaagtccacaccatcttcaaccaggccctgactcaaaccgggcgcctgtcaagcaccgaacctaatctccagaacatcccaattcgtctggaagaaggccgcaaaattcgccaagcatttgtgccatcgaaacctgactgggttatctttagcgcagattactcacagattgagctccgtgttctcgcacacctggcaaacgatgaaaatctgatcgatgcttttcgtcatgaccttgacatccatacgaagacagccatggatattttccatgtaacagcagatgaagttacccccaatatgcgtcgccaagcaaaagccgtgaacttcggtattgtctatgggatctctgattacggtctgagtcagcgtcttggcatcacgcgcaaagaagccgccgaatttattcgtcgttatttcgaaagctttcccggcgttaaacagtacatggagaatattgtaaaagaagccaaacagaaaggatacgtcaccacccttttacaccgccgccgctatctgccagacatcacctctcgtaatcgcaacttacgttcattcgcagaacgcacggccatgaacaccccaattcaaggatcagccgccgacatcatcaagaaggcaatgattgatttagctcgtcgtctgaaacgcgagaaacttcaagctcgtatgctgctccaggttcatgacgaactgattcttgaagctcctcgtgaggaagtcgaacgcctggttcagattgtacccgaggtcatggagaacgccatccagttaaccgtcccactgaaagttgattatcactacggtcctacgtggtacgacgctaag

SEQ ID NO: 270 - protein, 604 aa, synthetic construct
  REGION 1..604: note = Variant of DNA polymerase
MHHHHHHGGSGMVAPQTKKEMAVLPNINYTIVEEVTEPILADRSALVVEVLGSNYHKAPILGFALANEHGNFFIRTDTALSSPLFTAWLEDESKKKSVFDAKRAIVALKWKGIELRGIEFDLLLASYLLNPSQSTEDVASVAKTKQYMAVQRDEAVYGKGAKQTVPDENVLAEHLVRKAAAIRALEKELIHDLQENEQYALFTDLELPLSSVLAEMEFTGVKVDVERLKEMGEELTEQLRQVEQEIYKLAGQRFNINSPKQLGVILFEKLQLPVLKKTKTGYSTSADVLEKLARQHEIVRKILHYRQLGKLQSTYIEGLLKVVHRDTHKVHTIFNQALTQTGRLSSTEPNLQNIPIRLEEGRKIRQAFVPSKPDWVIFSADYSQIELRVLAHLANDENLIDAFRHDLDIHTKTAMDIFHVTADEVTPNMRRQAKAVNFGIVYGISDYGLSQRLGITRKEAAEFIRRYFESFPGVKQYMENIVKEAKQKGYVTTLLHRRRYLPDITSRNRNLRSFAERTAMNTPIQGSAADIIKKAMIDLARRLKREKLQARMLLQVHDELILEAPREEVERLVQIVPEVMENAIQLTVPLKVDYHYGPTWYDAK

SEQ ID NO: 271 - DNA, 1812 bp, synthetic construct
  misc_feature 1..1812: note = Variant of DNA polymerase
  source 1..1812: mol_type = other DNA
atgcatcaccatcaccatcacggtggcagcggtatggttgcaccacagaccaaaaaagaagaggccgtactgccgaacatcaattatacaattgtggaggaagtcaccgaaccgattctcgcggatcgttcggcgttagtggttgaggttctggggtccaactaccataaggctccgatcctgggctttgccctggccaatgaacacggtaacttcttcattcgcactgacacggctctttcttctccgctgtttaccgcgtggctggaggatgagagcaagaagaaatcagtattcgacgctaaacgcgcaatcgtggccctgaaatggaaaggcattgaattacgtggcatcgaatttgacttgttgctggcttcatatctcctgaatccctcgcaaagcacggaagatgtcgcaagcgtggccaagaccaaacagtacatggcagtacagagtgattgggcagtctatggaaaaggtgcgaaacaaacggtgccagatgaaaacgttttagccgaacatctggtgcgtaaagctgctgcaattcgcgccctggagaaagaactgatccacgatttgcaggaaaatgaacaatacgccctgtttactgaccttgaattacctctgtcctcggtcctggcagagatggaatttaccggtgtgaaagtagatgttgaacgcctgaaagaaatgggcgaggagctcacagaacaactgcgccaagtggagcaggaaatctataagttagctggccaacgcttcaacattaacagccctaaacaactgggtgtcattctgtttgaaaaattacagcttcccgtcctgaagaagacgaagaccggctatagtacgagtgctgatgtgctcgagaaacttgcccgtcagcatgaaatcgtccgcaaaattcttcactaccgtcagctcggtaaactgcaatccacatatattgaagggctgctgaaagttgtacatcgcgacacccataaagtccacaccatcttcaaccaggccctgactcaaaccgggcgcctgtcaagcaccgaacctaatctccagaacatcccaattcgtctggaagaaggccgcaaaattcgccaagcatttgtgccatcgaaacctgactgggttatctttagcgcagattactcacagattgagctccgtgttctcgcacacctggcaaacgatgaaaatctgatcgatgcttttcgtcatgacctcgacatccatacgaagacagccatggatattttccatgtaacagcagatgaagttacccccaatatgcgtcgccaagcaaaagccgtgaacttcggtattgtctatgggatctctgattacggtctgagtcagcgtcttggcatcacgcgcaaagaagccgccgaatttattcgtcgttatttcgaaagctttcccggcgttaaacagtacatggagaatattgtaaaagaagccaaacagaaaggatacgtcaccacccttttacaccgccgccgctatctgccagacatcacctctcgtaatcgtaacttacgttcattcgcagaacgcacggccatgaacaccccaattcaaggatcagccgccgacatcatcaagaaggcaatgattgatttagctgatcgtctgaaacgcgagaaacttcaagctcgtatgctgctccaggttcatgacgaactgattcttgaagctcctcgtgaggaagtcgaacgcctggttcagattgtacccgaggtcatggagaacgccatccagttaaccgtcccactgaaagttgattatcactacggtcctacgtggtacgacgctaag

SEQ ID NO: 272 - protein, 604 aa, synthetic construct
  REGION 1..604: note = Variant of DNA polymerase
MHHHHHHGGSGMVAPQTKKEEAVLPNINYTIVEEVTEPILADRSALVVEVLGSNYHKAPILGFALANEHGNFFIRTDTALSSPLFTAWLEDESKKKSVFDAKRAIVALKWKGIELRGIEFDLLLASYLLNPSQSTEDVASVAKTKQYMAVQSDWAVYGKGAKQTVPDENVLAEHLVRKAAAIRALEKELIHDLQENEQYALFTDLELPLSSVLAEMEFTGVKVDVERLKEMGEELTEQLRQVEQEIYKLAGQRFNINSPKQLGVILFEKLQLPVLKKTKTGYSTSADVLEKLARQHEIVRKILHYRQLGKLQSTYIEGLLKVVHRDTHKVHTIFNQALTQTGRLSSTEPNLQNIPIRLEEGRKIRQAFVPSKPDWVIFSADYSQIELRVLAHLANDENLIDAFRHDLDIHTKTAMDIFHVTADEVTPNMRRQAKAVNFGIVYGISDYGLSQRLGITRKEAAEFIRRYFESFPGVKQYMENIVKEAKQKGYVTTLLHRRRYLPDITSRNRNLRSFAERTAMNTPIQGSAADIIKKAMIDLADRLKREKLQARMLLQVHDELILEAPREEVERLVQIVPEVMENAIQLTVPLKVDYHYGPTWYDAK

SEQ ID NO: 273 - DNA, 1812 bp, synthetic construct
  misc_feature 1..1812: note = Variant of DNA polymerase
  source 1..1812: mol_type = other DNA
atgcatcaccatcaccatcacggtggcagcggtatggttgcaccacagaccaaaaaagaagaggccgtactgccgaacatcaattatacaattgtggaggaagtcaccgaaccgattctcgcggatcgttcggcgttagtggttgaggttctggggtccaactaccataaggctccgatcctgggctttgccctggccaatgaacacggtaacttcttcattcgcactgacacggctctttcttctccgctgtttaccgcgtggctggaggatgagagcaagaagaaatcagtattcgacgctaaacgcgcaatcgtggccctgaaatggaaaggcattgaattacgtggcatcgaatttgacttgttgctggcttcatatctcctgaatccctcgcaaagcacggaagatgtcgcaagcgtggccaagaccaaacagtacatggcagtacagcgcgatgaagcagtctatggaaaaggtgcgaaacaaacggtgccagatgaaaacgttttagccgaacatctggtgcgtaaagctgctgcaattcgcgccctggagaaagaactgatccacgatttgcaggaaaatgaacaatacgccctgtttactgaccttgaattacctctgtcctcggtcctggcagagatggaatttaccggtgtgaaagtagatgttgaacgcctgaaagaaatgggcgaggagctcacagaacaactgcgccaagtggagcaggaaatctataagttagctggccaagagttcaacattaacagccctaaacaactgggtgtcattctgtttgaaaaattacagcttcccgtcctgaagaagacgaagaccggctatagtacgagtgctgatgtgctcgagaaacttgcccgtcagcatgaaatcgtccgcaaaattcttcactaccgtcagctcggtaaactgcaatccacatatattgaagggctgctgaaagttgtacatcgcgacacccataaagtccacaccatcttcaaccaggccctgactcaaaccgggcgcctgtcaagcaccgaacctaatctccagaacatcccaattcgtctggaagaaggccgcaaaattcgccaagcatttgtgccatcgaaacctgactgggttatctttagcgcagattactcacagattgagctccgtgttctcgcacacctggcaaacgatgaaaatctgatcgatgcttttcgtcatgaccttgacatccatacgaagacagccatggatattttccatgtaacagcagatgaagttacccccaatatgcgtcgccaagcaaaagccgtgaacttcggtattgtctatgggatctctgattacggtctgagtcagcgtcttggcatcccgcgcaaagaagccgccgaatttattcgtcgttatttcgaaagctttcccggcgttaaacagtacatggagaatattgtaaaagaagccaaacagaaaggatacgtcaccacccttttacaccgccgccgctatctgccagacatcacctctcgtaatcgtaacttacgttcattcgcagaacgcacggccatgaacaccccaattcaaggatcagccgccgacatcatcaagaaggcaatgattgatttagctgaccgtctgaaacgcgagaaacttcaagctcgtatgctgctccaggttcatgacgaactgattcttgaagctcctcgtgaggaagtcgaacgcctgcagcagattgtacccgaggtcatggagaacgccatccagttaaccgtcccactgaaagttgattatcactacggtcctacgtggtacgacgctaag

SEQ ID NO: 274 - protein, 604 aa, synthetic construct
  REGION 1..604: note = Variant of DNA polymerase
MHHHHHHGGSGMVAPQTKKEEAVLPNINYTIVEEVTEPILADRSALVVEVLGSNYHKAPILGFALANEHGNFFIRTDTALSSPLFTAWLEDESKKKSVFDAKRAIVALKWKGIELRGIEFDLLLASYLLNPSQSTEDVASVAKTKQYMAVQRDEAVYGKGAKQTVPDENVLAEHLVRKAAAIRALEKELIHDLQENEQYALFTDLELPLSSVLAEMEFTGVKVDVERLKEMGEELTEQLRQVEQEIYKLAGQEFNINSPKQLGVILFEKLQLPVLKKTKTGYSTSADVLEKLARQHEIVRKILHYRQLGKLQSTYIEGLLKVVHRDTHKVHTIFNQALTQTGRLSSTEPNLQNIPIRLEEGRKIRQAFVPSKPDWVIFSADYSQIELRVLAHLANDENLIDAFRHDLDIHTKTAMDIFHVTADEVTPNMRRQAKAVNFGIVYGISDYGLSQRLGIPRKEAAEFIRRYFESFPGVKQYMENIVKEAKQKGYVTTLLHRRRYLPDITSRNRNLRSFAERTAMNTPIQGSAADIIKKAMIDLADRLKREKLQARMLLQVHDELILEAPREEVERLQQIVPEVMENAIQLTVPLKVDYHYGPTWYDAK

SEQ ID NO: 275 - DNA, 1812 bp, synthetic construct
  misc_feature 1..1812: note = Variant of DNA polymerase
  source 1..1812: mol_type = other DNA
atgcatcaccatcaccatcacggtggcagcggtatggttgcaccacagaccaaaaaagaagaggccgtactgccgaacatcaattatacaattgtggaggaagtcaccgaaccgattctcgcggatcgttcggcgttagtggttgaggttctggggtccaactaccataaggctccgatcctgggctttgccctggccaatgaacacggtaacttcttcattcgcactgacacggctctttcttctccgctgtttaccgcgtggctggaggatgagagcaagaagaaatcagtattcgacgctaaacgcgcaatcgtggccctgaaatggaaaggcattgaattacgtggcatcgaatttgacttgttgctggcttcatatctcctgaatccctcgcaaagcacggaagatgtcgcaagcgtggccaagaccaaacagtacatggcagtacagagtgattgggcagtctatggaaaaggtgcgaaacaaacggtgccagatgaaaacgttttagccgaacatctggtgcgtaaagctgctgcaattcgcgccctggagaaagaactgatccacgatttgcaggaaaatgaacaatacgccctgtttactgaccttgaattacctctgtcctcggtcctggcagagatggaatttaccggtgtgaaagtagatgttgaacgcctgaaagaaatgggcgaggagctcacagaacaactgcgccaagtggagcaggaaatctataagttagctggccaacgcttcaacattaacagccctaaacaactgggtgtcattctgtttgaaaaattacagcttcccgtcctgaagaagacgaagaccggctatagtacgagtgctgatgtgctcgagaaacttgcccgtcagcatgaaatcgtccgcaaaattcttcactaccgtcagctcggtaaactgcaatccacatatattgaagggctgctgaaagttgtacatcgcgacacccataaagtccacaccatcttcaaccaggccctgactcaaaccgggcgcctgtcaagcaccgaacctaatctccagaacatcccaattcgtctggaagaaggccgcaaaattcgccaagcatttgtgccatcgaaacctgactgggttatctttagcgcagattactcacagattgagctccgtgttctcgcacacctggcaaacgatgaaaatctgatcgatgcttttcgtcatgaccttgacatccatacgaagacagccatggatattttccatgtaacagcagatgaagttacccccaatatgcgtcgccaagcaaaagccgtgaacttcggtattgtctatgggatctctgattacggtctgagtcagcgtcttggcatcccgcgcaaagaagccgccgaatttattcgtcgttatttcgaaagctttcccggcgttaaacagtacatggagaatattgtaaaagaagccaaacagaaaggatacgtcaccacccttttacaccgccgccgctatctgccagacatccattctcgtaatcgcaacttacgttcattcgcagaacgcacggccatgaacaccccaattcaaggatcagccgccgacatcatcaagaaggcaatgattgatttagctcgtcgtctgaaacgcgagaaacttcaagctcgtatgctgctccaggttcatgacgaactgattcttgaagctcctcgtgaggaagtcgaacgcctgcagcagattgtacccgaggtcatggagaacgccatccagttaaccgtcccactgaaagttagctatcactacggtcctacgtggtacgacgctaag

SEQ ID NO: 276 - protein, 604 aa, synthetic construct
  REGION 1..604: note = Variant of DNA polymerase
MHHHHHHGGSGMVAPQTKKEEAVLPNINYTIVEEVTEPILADRSALVVEVLGSNYHKAPILGFALANEHGNFFIRTDTALSSPLFTAWLEDESKKKSVFDAKRAIVALKWKGIELRGIEFDLLLASYLLNPSQSTEDVASVAKTKQYMAVQSDWAVYGKGAKQTVPDENVLAEHLVRKAAAIRALEKELIHDLQENEQYALFTDLELPLSSVLAEMEFTGVKVDVERLKEMGEELTEQLRQVEQEIYKLAGQRFNINSPKQLGVILFEKLQLPVLKKTKTGYSTSADVLEKLARQHEIVRKILHYRQLGKLQSTYIEGLLKVVHRDTHKVHTIFNQALTQTGRLSSTEPNLQNIPIRLEEGRKIRQAFVPSKPDWVIFSADYSQIELRVLAHLANDENLIDAFRHDLDIHTKTAMDIFHVTADEVTPNMRRQAKAVNFGIVYGISDYGLSQRLGIPRKEAAEFIRRYFESFPGVKQYMENIVKEAKQKGYVTTLLHRRRYLPDIHSRNRNLRSFAERTAMNTPIQGSAADIIKKAMIDLARRLKREKLQARMLLQVHDELILEAPREEVERLQQIVPEVMENAIQLTVPLKVSYHYGPTWYDAK

SEQ ID NO: 277 - DNA, 1812 bp, synthetic construct
  misc_feature 1..1812: note = Variant of DNA polymerase
  source 1..1812: mol_type = other DNA
atgcatcaccatcaccatcacggtggcagcggtatggttgcaccacagaccaaaaaagaaatggccgtactgccgaacatcaattatacaattgtggaggaagtcaccgaaccgattctcgcggatcgttcggcgttagtggttgaggttctggggtccaactaccataaggctccgatcctgggctttgccctggccaatgaacacggtaacttcttcattcgcactgacacggctctttcttctccgctgtttaccgcgtggctggaggatgagagcaagaagaaatcagtattcgacgctaaacgcgcaatcgtggccctgaaatggaaaggcattgaattacgtggcatcgaatttgacttgttgctggcttcatatctcctgaatccctcgcaaagcacggaagatgtcgcaagcgtggccaagaccaaacagtacatggcagtacagagtgattgggcagtctatggaaaaggtgcgaaacaaacggtgccagatgaaaacgttttagccgaacatctggtgcgtaaagctgctgcaattcgcgccctggagaaagaactgatccacgatttgcaggaaaatgaacaatacgccctgtttactgaccttgaattacctctgtcctcggtcctggcagagatggaatttaccggtgtgaaagtagatgttgaacgcctgaaagaaatgggcgaggagctcacagaacaactgcgccaagtggagcaggaaatctataagttagctggccaagagttcaacattaacagccctaaacaactgggtgtcattctgtttgaaaaattacagcttcccgtcctgaagaagacgaagaccggctatagtacgagtgctgatgtgctcgagaaacttgcccgtcagcatgaaatcgtccgcaaaattcttcactaccgtcagctcggtaaactgcaatccacatatattgaagggctgctgaaagttgtacatcgcgacacccataaagtccacaccatcttcaaccaggccctgactcaaaccgggcgcctgtcaagcaccgaacctaatctccagaacatcccaattcgtctggaagaaggccgcaaaattcgccaagcatttgtgccatcgaaacctgactgggttatctttagcgcagattactcacagattgagctccgtgttctcgcacacctggcaaacgatgaaaatctgatcgatgcttttcgtcatgaccttgacatccatacgaagacagccatggatattttccatgtaacagcagatgaagttacccccaatatgcgtcgccaagcaaaagccgtgaacttcggtattgtctatgggatctctgattacggtctgagtcagcgtcttggcatcccgcgcaaagaagccgccgaatttattcgtcgttatttcgaaagctttcccggcgttaaacagtacatggagaatattgtaaaagaagccaaacagaaaggatacgtcaccacccttttacaccgccgccgctatctgccagacatcacctctcgtaatcgtaacttacgttcattcgcagaacgcacggccatgaacaccccaattcaaggatcagccgccgacatcatcaagaaggcaatgattgatttagctgatcgtctgaaacgcgagaaacttcaagctcgtatgctgctccaggttcatgacgaactgattcttgaagctcctcgtgaggaagtcgaacgcctggttcagattgtacccgaggtcatggagaacgccgtccagttaaccgtcccactgaaagttgattatcactacggtcctacgtggtacgacgctaag

SEQ ID NO: 278 - protein, 604 aa, synthetic construct
  REGION 1..604: note = Variant of DNA polymerase
MHHHHHHGGSGMVAPQTKKEMAVLPNINYTIVEEVTEPILADRSALVVEVLGSNYHKAPILGFALANEHGNFFIRTDTALSSPLFTAWLEDESKKKSVFDAKRAIVALKWKGIELRGIEFDLLLASYLLNPSQSTEDVASVAKTKQYMAVQSDWAVYGKGAKQTVPDENVLAEHLVRKAAAIRALEKELIHDLQENEQYALFTDLELPLSSVLAEMEFTGVKVDVERLKEMGEELTEQLRQVEQEIYKLAGQEFNINSPKQLGVILFEKLQLPVLKKTKTGYSTSADVLEKLARQHEIVRKILHYRQLGKLQSTYIEGLLKVVHRDTHKVHTIFNQALTQTGRLSSTEPNLQNIPIRLEEGRKIRQAFVPSKPDWVIFSADYSQIELRVLAHLANDENLIDAFRHDLDIHTKTAMDIFHVTADEVTPNMRRQAKAVNFGIVYGISDYGLSQRLGIPRKEAAEFIRRYFESFPGVKQYMENIVKEAKQKGYVTTLLHRRRYLPDITSRNRNLRSFAERTAMNTPIQGSAADIIKKAMIDLADRLKREKLQARMLLQVHDELILEAPREEVERLVQIVPEVMENAVQLTVPLKVDYHYGPTWYDAK

SEQ ID NO: 279 - DNA, 1812 bp, synthetic construct
  misc_feature 1..1812: note = Variant of DNA polymerase
  source 1..1812: mol_type = other DNA
atgcatcaccatcaccatcacggtggcagcggtatggttgcaccacagaccaaaaaagaagaagccgtactgccgaacatcaattatacaattgtggaggaagtcaccgaaccgattctcgcggatcgttcggcgttagtggttgaggttctggggtccaactaccataaggctccgatcctgggctttgccctggccaatgaacacggtaacttcttcattcgcactgacacggctctttcttctccgctgtttaccgcgtggctggaggatgagagcaagaagaaatcagtattcgacgctaaacgcgcaatcgtggccctgaaatggaaaggcattgaattacgtggcatcgaatttgacttgttgctggcttcatatctcctgaatccctcgcaaagcacggaagatgtcgcaagcgtggccaagaccaaacagtacatggcagtacagagtgattgggcagtctatggaaaaggtgcgaaacaaacggtgccagatgaaaacgttttagccgaacatctggtgcgtaaagctgctgcaattcgcgccctggagaaagaactgatccacgatttgcaggaaaatgaacaatacgccctgtttactgaccttgaattacctctgtcctcggtcctggcagagatggaatttaccggtgtgaaagtagatgttgaacgcctgaaagaaatgggcgaggagctcacagaacaactgcgccaagtggagcaggaaatctataagttagctggccaagagttcaacattaacagccctaaacaactgggtgtcattctgtttgaaaaattacagcttcccgtcctgaagaagacgaagaccggctatagtacgagtgctgatgtgctcgagaaacttgcccgtcagcatgaaatcgtccgcaaaattcttcactaccgtcagctcggtaaactgcaatccacatatattgaagggctgctgaaagttgtacatcgcgacacccataaagtccacaccatcttcaaccaggccctgactcaaaccgggcgcctgtcaagcaccgaacctaatctccagaacatcccaattcgtctggaagaaggccgcaaaattcgccaagcatttgtgccatcgaaacctgactgggttatctttagcgcagattactcacagattgagctccgtgttctcgcacacctggcaaacgatgaaaatctgatcgatgcttttcgtcatgaccttgacatccatacgaagacagccatggatattttccatgtaacagcagatgaagttacccccaatatgcgtcgccaagcaaaagccgtgaacttcggtattgtctatgggatctctgattacggtctgagtcagcgtcttaacatcacgcgcaaagaagccgccgaatttattcgtcgttatttcgaaagctttcccggcgttaaacagtacatggagaatattgtaaaagaagccaaacagaaaggatacgtcaccacccttttacaccgccgccgctatctgccagacatcacctctcgtaatcgcaacttacgttcattcgcagaacgcacggccatgaacaccccaattcaaggatcagccgccgacatcatcaagaaggcaatgattgatttagctgatcgtctgaaacgcgagaaacttcaagctcgtatgctgctccaggttcatgacgaactgattcttgaagctcctcgtgaggaagtcgaacgcctggttcagattgtacccgaggtcatggagaacgccatccagttaaccgtcccactgaaagttagctatcactacggtcctacgtggtacgacgctaag

SEQ ID NO: 280 - protein, 604 aa, synthetic construct
  REGION 1..604: note = Variant of DNA polymerase
MHHHHHHGGSGMVAPQTKKEEAVLPNINYTIVEEVTEPILADRSALVVEVLGSNYHKAPILGFALANEHGNFFIRTDTALSSPLFTAWLEDESKKKSVFDAKRAIVALKWKGIELRGIEFDLLLASYLLNPSQSTEDVASVAKTKQYMAVQSDWAVYGKGAKQTVPDENVLAEHLVRKAAAIRALEKELIHDLQENEQYALFTDLELPLSSVLAEMEFTGVKVDVERLKEMGEELTEQLRQVEQEIYKLAGQEFNINSPKQLGVILFEKLQLPVLKKTKTGYSTSADVLEKLARQHEIVRKILHYRQLGKLQSTYIEGLLKVVHRDTHKVHTIFNQALTQTGRLSSTEPNLQNIPIRLEEGRKIRQAFVPSKPDWVIFSADYSQIELRVLAHLANDENLIDAFRHDLDIHTKTAMDIFHVTADEVTPNMRRQAKAVNFGIVYGISDYGLSQRLNITRKEAAEFIRRYFESFPGVKQYMENIVKEAKQKGYVTTLLHRRRYLPDITSRNRNLRSFAERTAMNTPIQGSAADIIKKAMIDLADRLKREKLQARMLLQVHDELILEAPREEVERLVQIVPEVMENAIQLTVPLKVSYHYGPTWYDAK

SEQ ID NO: 281 - DNA, 1812 bp, synthetic construct
  misc_feature 1..1812: note = Variant of DNA polymerase
  source 1..1812: mol_type = other DNA
atgcatcaccatcaccatcacggtggcagcggtatggttgcaccacagaccaaaaaagaagaggccgtactgccgaacatcaattatacaattgtggaggaagtcaccgaaccgattctcgcggatcgttcggcgttagtggttgaggttctggggtccaactaccataaggctccgatcctgggctttgccctggccaatgaacacggtaacttcttcattcgcactgacacggctctttcttctccgctgtttaccgcgtggctggaggatgagagcaagaagaaatcagtattcgacgctaaacgcgcaatcgtggccctgaaatggaaaggcattgaattacgtggcatcgaatttgacttgttgctggcttcatatctcctgaatccctcgcaaagcacggaagatgtcgcaagcgtggccaagaccaaacagtacatggcagtacagcgcgatgaagcagtctatggaaaaggtgcgaaacaaacggtgccagatgaaaacgttttagccgaacatctggtgcgtaaagctgctgcaattcgcgccctggagaaagaactgatccacgatttgcaggaaaatgaacaatacgccctgtttactgaccttgaattacctctgtcctcggtcctggcagagatggaatttaccggtgtgaaagtagatgttgaacgcctgaaagaaatgggcgaggagctcacagaacaactgcgccaagtggagcaggaaatctataagttagctggccaacgcttcaacattaacagccctaaacaactgggtgtcattctgtttgaaaaattacagcttcccgtcctgaagaagacgaagaccggctatagtacgagtgctgatgtgctcgagaaacttgcccgtcagcatgaaatcgtccgcaaaattcttcactaccgtcagctcggtaaactgcaatccacatatattgaagggctgctgaaagttgtacatcgcgacacccataaagtccacaccatcttcaaccaggccctgactcaaaccgggcgcctgtcaagcaccgaacctaatctccagaacatcccaattcgtctggaagaaggccgcaaaattcgccaagcatttgtgccatcgaaacctgactgggttatctttagcgcagattactcacagattgagctccgtgttctcgcacacctggcaaacgatgaaaatctgatcgatgcttttcgtcatgaccttgacatccatacgaagacagccatggatattttccatgtaacagcagatgaagttacccccaatatgcgtcgccaagcaaaagccgtgaacttcggtattgtctatgggatctctgattacggtctgagtcagcgtcttggcatcccgcgcaaagaagccgccgaatttattcgtcgttatttcgaaagctttcccggcgttaaacagtacatggagaatattgtaaaagaagccaaacagaaaggatacgtcaccacccttttacaccgccgccgctatctgccagacatcacctctcgtaatcgtaacttacgttcattcgcagaacgcacggccatgaacaccccaattcaaggatcagccgccgacatcatcaagaaggcaatgattgatttagctgatcgtctgaaaaaagagaaacttcaagctcgtatgctgctccaggttcatgacgaactgattcttgaagctcctcgtgaggaagtcgaacgcctggttcagattgtacccgaggtcatggagaacgccatccagttaaccgtcccactgaaagttgattatcactacggtcctacgtggtacgacgctaag

SEQ ID NO: 282 - protein, 604 aa, synthetic construct
  REGION 1..604: note = Variant of DNA polymerase
MHHHHHHGGSGMVAPQTKKEEAVLPNINYTIVEEVTEPILADRSALVVEVLGSNYHKAPILGFALANEHGNFFIRTDTALSSPLFTAWLEDESKKKSVFDAKRAIVALKWKGIELRGIEFDLLLASYLLNPSQSTEDVASVAKTKQYMAVQRDEAVYGKGAKQTVPDENVLAEHLVRKAAAIRALEKELIHDLQENEQYALFTDLELPLSSVLAEMEFTGVKVDVERLKEMGEELTEQLRQVEQEIYKLAGQRFNINSPKQLGVILFEKLQLPVLKKTKTGYSTSADVLEKLARQHEIVRKILHYRQLGKLQSTYIEGLLKVVHRDTHKVHTIFNQALTQTGRLSSTEPNLQNIPIRLEEGRKIRQAFVPSKPDWVIFSADYSQIELRVLAHLANDENLIDAFRHDLDIHTKTAMDIFHVTADEVTPNMRRQAKAVNFGIVYGISDYGLSQRLGIPRKEAAEFIRRYFESFPGVKQYMENIVKEAKQKGYVTTLLHRRRYLPDITSRNRNLRSFAERTAMNTPIQGSAADIIKKAMIDLADRLKKEKLQARMLLQVHDELILEAPREEVERLVQIVPEVMENAIQLTVPLKVDYHYGPTWYDAK

SEQ ID NO: 283 - DNA, 1812 bp, synthetic construct
  misc_feature 1..1812: note = Variant of DNA polymerase
  source 1..1812: mol_type = other DNA
atgcatcaccatcaccatcacggtggcagcggtatggttgcaccacagaccaaaaaagaaatggccgtactgccgaacatcaattatacaattgtggaggaagtcaccgaaccgattctcgcggatcgttcggcgttagtggttgaggttctggggtccaactaccataaggctccgatcctgggctttgccctggccaatgaacacggtaacttcttcattcgcactgacacggctctttcttctccgctgtttaccgcgtggctggaggatgagagcaagaagaaatcagtattcgacgctaaacgcgcaatcgtggccctgaaatggaaaggcattgaattacgtggcatcgaatttgacttgttgctggcttcatatctcctgaatccctcgcaaagcacggaagatgtcgcaagcgtggccaagaccaaacagtacatggcagtacagagtgatgaggcagtctatggaaaaggtgcgaaacaaacggtgccagatgaaaacgttttagccgaacatctggtgcgtaaagctgctgcaattcgcgccctggagaaagaactgatccacgatttgcaggaaaatgaacaatacgccctgtttactgaccttgaattacctctgtcctcggtcctggcagagatggaatttaccggtgtgaaagtagatgttgaacgcctgaaagaaatgggcgaggagctcacagaacaactgcgccaagtggagcaggaaatctataagttagctggccaagagttcaacattaacagccctaaacaactgggtgtcattctgtttgaaaaattacagcttcccgtcctgaagaagacgaagaccggctatagtacgagtgctgatgtgctcgagaaacttgcccgtcagcatgaaatcgtccgcaaaattcttcactaccgtcagctcggtaaactgcaatccacatatattgaagggctgctgaaagttgtacatcgcgacacccataaagtccacaccatcttcaaccaggccctgactcaaaccgggcgcctgtcaagcaccgaacctaatctccagaacatcccaattcgtctggaagaaggccgcaaaattcgccaagcatttgtgccatcgaaacctgactgggttatctttagcgcagattactcacagattgagctccgtgttctcgcacacctggcaaacgatgaaaatctgatcgatgcttttcgtcatgaccttgacatccatacgaagacagccatggatattttccatgtaacagcagatgaagttacccccaatatgcgtcgccaagcaaaagccgtgaacttcggtattgtctatgggatctctgattacggtctgagtcagcgtcttaacatcacgcgcaaagaagccgccgaatttattcgtcgttatttcgaaagctttcccggcgttaaacagtacatggagaatattgtaaaagaagccaaacagaaaggatacgtcaccacccttttccaccgccgccgctatctgccagacatccattctcgtaatcgcaacttacgttcattcgcagaacgcacggccatgaacaccccaattcaaggatcagccgccgacatcatcaagaaggcaatgattgatttagctcgtcgtctgaaacgcgagaaacttcaagctcgtatgctgctccaggttcatgacgaactgattcttgaagctcctcgtgaggaagtcgaacgcctgcagcagattgtacccgaggtcatggagaacgccgtccagttaaccgtcccactgaaagttgattatcactacggtcctacgtggtacgacgctaag

SEQ ID NO: 284 - protein, 604 aa, synthetic construct
  REGION 1..604: note = Variant of DNA polymerase
MHHHHHHGGSGMVAPQTKKEMAVLPNINYTIVEEVTEPILADRSALVVEVLGSNYHKAPILGFALANEHGNFFIRTDTALSSPLFTAWLEDESKKKSVFDAKRAIVALKWKGIELRGIEFDLLLASYLLNPSQSTEDVASVAKTKQYMAVQSDEAVYGKGAKQTVPDENVLAEHLVRKAAAIRALEKELIHDLQENEQYALFTDLELPLSSVLAEMEFTGVKVDVERLKEMGEELTEQLRQVEQEIYKLAGQEFNINSPKQLGVILFEKLQLPVLKKTKTGYSTSADVLEKLARQHEIVRKILHYRQLGKLQSTYIEGLLKVVHRDTHKVHTIFNQALTQTGRLSSTEPNLQNIPIRLEEGRKIRQAFVPSKPDWVIFSADYSQIELRVLAHLANDENLIDAFRHDLDIHTKTAMDIFHVTADEVTPNMRRQAKAVNFGIVYGISDYGLSQRLNITRKEAAEFIRRYFESFPGVKQYMENIVKEAKQKGYVTTLFHRRRYLPDIHSRNRNLRSFAERTAMNTPIQGSAADIIKKAMIDLARRLKREKLQARMLLQVHDELILEAPREEVERLQQIVPEVMENAVQLTVPLKVDYHYGPTWYDAK

SEQ ID NO: 285 - DNA, 1812 bp, synthetic construct
  misc_feature 1..1812: note = Variant of DNA polymerase
  source 1..1812: mol_type = other DNA
atgcatcaccatcaccatcacggtggcagcggtatggttgcaccacagaccaaaaaagaagaggccgtactgccgaacatcaattatacaattgtggaggaagtcaccgaaccgattctcgcggatcgttcggcgttagtggttgaggttctggggtccaactaccataaggctccgatcctgggctttgccctggccaatgaacacggtaacttcttcattcgcactgacacggctctttcttctccgctgtttaccgcgtggctggaggatgagagcaagaagaaatcagtattcgacgctaaacgcgcaatcgtggccctgaaatggaaaggcattgaattacgtggcatcgaatttgacttgttgctggcttcatatctcctgaatccctcgcaaagcacggaagatgtcgcaagcgtggccaagaccaaacagtacatggcagtacagagtgattgggcagtctatggaaaaggtgcgaaacaaacggtgccagatgaaaacgttttagccgaacatctggtgcgtaaagctgctgcaattcgcgccctggagaaagaactgatccacgatttgcaggaaaatgaacaatacgccctgtttactgaccttgaattacctctgtcctcggtcctggcagagatggaatttaccggtgtgaaagtagatgttgaacgcctgaaagaaatgggcgaggagctcacagaacaactgcgccaagtggagcaggaaatctataagttagctggccaagagttcaacattaacagccctaaacaactgggtgtcattctgtttgaaaaattacagcttcccgtcctgaagaagacgaagaccggctatagtacgagtgctgatgtgctcgagaaacttgcccgtcagcatgaaatcgtccgcaaaattcttcactaccgtcagctcggtaaactgcaatccacatatattgaagggctgctgaaagttgtacatcgcgacacccataaagtccacaccatcttcaaccaggccctgactcaaaccgggcgcctgtcaagcaccgaacctaatctccagaacatcccaattcgtctggaagaaggccgcaaaattcgccaagcatttgtgccatcgaaacctgactgggttatctttagcgcagattactcacagattgagctccgtgttctcgcacacctggcaaacgatgaaaatctgatcgatgcttttcgtcatgaccttgacatccatacgaagacagccatggatattttccatgtaacagcagatgaagttacccccaatatgcgtcgccaagcaaaagccgtgaacttcggtattgtctatgggatctctgattacggtctgagtcagcgtcttggcatcccgcgcaaagaagccgccgaatttattcgtcgttatttcgaaagctttcccggcgttaaacagtacatggagaatattgtaaaagaagccaaacagaaaggatacgtcaccacccttttacaccgccgccgctatctgccagacatcacctctcgtaatcgtaacttacgttcattcgcagaacgcacggccatgaacaccccaattcaaggatcagccgccgacatcatcaagaaggcaatgattgatttagctggccgtctgaaacgcgagaaacttcaagctcgtatgctgctccaggttcatgacgaactgattcttgaagctcctcgtgaggaagtcgaacgcctgcagcagattgtacccgaggtcatggagaacgccgtccagttaaccgtcccactgaaagttgattatcactacggtcctacgtggtacgacgctaag

SEQ ID NO: 286 - protein, 604 aa, synthetic construct
  REGION 1..604: note = Variant of DNA polymerase
MHHHHHHGGSGMVAPQTKKEEAVLPNINYTIVEEVTEPILADRSALVVEVLGSNYHKAPILGFALANEHGNFFIRTDTALSSPLFTAWLEDESKKKSVFDAKRAIVALKWKGIELRGIEFDLLLASYLLNPSQSTEDVASVAKTKQYMAVQSDWAVYGKGAKQTVPDENVLAEHLVRKAAAIRALEKELIHDLQENEQYALFTDLELPLSSVLAEMEFTGVKVDVERLKEMGEELTEQLRQVEQEIYKLAGQEFNINSPKQLGVILFEKLQLPVLKKTKTGYSTSADVLEKLARQHEIVRKILHYRQLGKLQSTYIEGLLKVVHRDTHKVHTIFNQALTQTGRLSSTEPNLQNIPIRLEEGRKIRQAFVPSKPDWVIFSADYSQIELRVLAHLANDENLIDAFRHDLDIHTKTAMDIFHVTADEVTPNMRRQAKAVNFGIVYGISDYGLSQRLGIPRKEAAEFIRRYFESFPGVKQYMENIVKEAKQKGYVTTLLHRRRYLPDITSRNRNLRSFAERTAMNTPIQGSAADIIKKAMIDLAGRLKREKLQARMLLQVHDELILEAPREEVERLQQIVPEVMENAVQLTVPLKVDYHYGPTWYDAK

SEQ ID NO: 287 - DNA, 1812 bp, synthetic construct
  misc_feature 1..1812: note = Variant of DNA polymerase
  source 1..1812: mol_type = other DNA
atgcatcaccatcaccatcacggtggcagcggtatggttgcaccacagaccaaaaaagaagaggccgtactgccgaacatcaattatacaattgtggaggaagtcaccgaaccgattctcgcggatcgttcggcgttagtggttgaggttctggggtccaactaccataaggctccgatcctgggctttgccctggccaatgaacacggtaacttcttcattcgcactgacacggctctttcttctccgctgtttaccgcgtggctggaggatgagagcaagaagaaatcagtattcgacgctaaacgcgcaatcgtggccctgaaatggaaaggcattgaattacgtggcatcgaatttgacttgttgctggcttcatatctcctgaatccctcgcaaagcacggaagatgtcgcaagcgtggccaagaccaaacagtacatggcagtacagagcgatgaagcagtctatggaaaaggtgcgaaacaaacggtgccagatgaaaacgttttagccgaacatctggtgcgtaaagctgctgcaattcgcgccctggagaaagaactgatccacgatttgcaggaaaatgaacaatacgccctgtttactgaccttgaattacctctgtcctcggtcctggcagagatggaatttaccggtgtgaaagtagatgttgaacgcctgaaagaaatgggcgaggagctcacagaacaactgcgccaagtggagcaggaaatctataagttagctggccaacgcttcaacattaacagccctaaacaactgggtgtcattctgtttgaaaaattacagcttcccgtcctgaagaagacgaagaccggctatagtacgagtgctgatgtgctcgagaaacttgcccgtcagcatgaaatcgtccgcaaaattcttcactaccgtcagctcggtaaactgcaatccacatatattgaagggctgctgaaagttgtacatcgcgacacccataaagtccacaccatcttcaaccaggccctgactcaaaccgggcgcctgtcaagcaccgaacctaatctccagaacatcccaattcgtctggaagaaggccgcaaaattcgccaagcatttgtgccatcgaaacctgactgggttatctttagcgcagattactcacagattgagctccgtgttctcgcacacctggcaaacgatgaaaatctgatcgatgcttttcgtcatgaccttgacatccatacgaagacagccatggatattttccatgtaacagcagatgaagttacccccaatatgcgtcgccaagcaaaagccgtgaacttcggtattgtctatgggatctctgattacggtctgagtcagcgtcttaacatcccgcgcaaagaagccgccgaatttattcgtcgttatttcgaaagctttcccggcgttaaacagtacatggagaatattgtaaaagaagccaaacagaaaggatacgtcaccacccttttacaccgccgccgctatctgccagacatccattctcgtaatcgcaacttacgttcattcgcagaacgcacggccatgaacaccccaattcaaggatcagccgccgacatcatcaagaaggcaatgattgatttagctcgtcgtctgaaacgcgagaaacttcaagctcgtatgctgctccaggttcatgacgaactgattcttgaagctcctcgtgaggaagtcgaacgcctggttcagattgtacccgaggtcatggagaacgccgtccagttaaccgtcccactgaaagttgattatcactacggtcctacgtggtacgacgctaag

SEQ ID NO: 288 - protein, 604 aa, synthetic construct
  REGION 1..604: note = Variant of DNA polymerase
MHHHHHHGGSGMVAPQTKKEEAVLPNINYTIVEEVTEPILADRSALVVEVLGSNYHKAPILGFALANEHGNFFIRTDTALSSPLFTAWLEDESKKKSVFDAKRAIVALKWKGIELRGIEFDLLLASYLLNPSQSTEDVASVAKTKQYMAVQSDEAVYGKGAKQTVPDENVLAEHLVRKAAAIRALEKELIHDLQENEQYALFTDLELPLSSVLAEMEFTGVKVDVERLKEMGEELTEQLRQVEQEIYKLAGQRFNINSPKQLGVILFEKLQLPVLKKTKTGYSTSADVLEKLARQHEIVRKILHYRQLGKLQSTYIEGLLKVVHRDTHKVHTIFNQALTQTGRLSSTEPNLQNIPIRLEEGRKIRQAFVPSKPDWVIFSADYSQIELRVLAHLANDENLIDAFRHDLDIHTKTAMDIFHVTADEVTPNMRRQAKAVNFGIVYGISDYGLSQRLNIPRKEAAEFIRRYFESFPGVKQYMENIVKEAKQKGYVTTLLHRRRYLPDIHSRNRNLRSFAERTAMNTPIQGSAADIIKKAMIDLARRLKREKLQARMLLQVHDELILEAPREEVERLVQIVPEVMENAVQLTVPLKVDYHYGPTWYDAK

SEQ ID NO: 289 - DNA, 1812 bp, synthetic construct
  misc_feature 1..1812: note = Variant of DNA polymerase
  source 1..1812: mol_type = other DNA
atgcatcaccatcaccatcacggtggcagcggtatggttgcaccacagaccaaaaaagaagaggccgtactgccgaacatcaattatacaattgtggaggaagtcaccgaaccgattctcgcggatcgttcggcgttagtggttgaggttctggggtccaactaccataaggctccgatcctgggctttgccctggccaatgaacacggtaacttcttcattcgcactgacacggctctttcttctccgctgtttaccgcgtggctggaggatgagagcaagaagaaatcagtattcgacgctaaacgcgcaatcgtggccctgaaatggaaaggcattgaattacgtggcatcgaatttgacttgttgctggcttcatatctcctgaatccctcgcaaagcacggaagatgtcgcaagcgtggccaagaccaaacagtacatggcagtacagagtgatgaggcagtctatggaaaaggtgcgaaacaaacggtgccagatgaaaacgttttagccgaacatctggtgcgtaaagctgctgcaattcgcgccctggagaaagaactgatccacgatttgcaggaaaatgaacaatacgccctgtttactgaccttgaattacctctgtcctcggtcctggcagagatggaatttaccggtgtgaaagtagatgttgaacgcctgaaagaaatgggcgaggagctcacagaacaactgcgccaagtggagcaggaaatctataagttagctggccaacgcttcaacattaacagccctaaacaactgggtgtcattctgtttgaaaaattacagcttcccgtcctgaagaagacgaagaccggctatagtacgagtgctgatgtgctcgagaaacttgcccgtcagcatgaaatcgtccgcaaaattcttcactaccgtcagctcggtaaactgcaatccacatatattgaagggctgctgaaagttgtacatcgcgacacccataaagtccacaccatcttcaaccaggccctgactcaaaccgggcgcctgtcaagcaccgaacctaatctccagaacatcccaattcgtctggaagaaggccgcaaaattcgccaagcatttgtgccatcgaaacctgactgggttatctttagcgcagattactcacagattgagctccgtgttctcgcacacctggcaaacgatgaaaatctgatcgatgcttttcgtcatgaccttgacatccatacgaagacagccatggatattttccatgtaacagcagatgaagttacccccaatatgcgtcgccaagcaaaagccgtgaacttcggtattgtctatgggatctctgattacggtctgagtcagcgtcttaacatcccgcgcaaagaagccgccgaatttattcgtcgttatttcgaaagctttcccggcgttaaacagtacatggagaatattgtaaaagaagccaaacagaaaggatacgtcaccacccttttacaccgccgccgctatctgccagacatcacctctcgtaatcgtaacttacgttcattcgcagaacgcacggccatgaacaccccaattcaaggatcagccgccgacatcatcaagaaggcaatgattgatttagctgatcgtctgaaacgcgagaaacttcaagctcgtatgctgctccaggttcatgacgaactgattcttgaagctcctcgtgaggaagtcgaacgcctgcagcagattgtacccgaggtcatggagaacgccgtccagttaaccgtcccactgaaagttgattatcactacggtcctacgtggtacgacgctaag

SEQ ID NO: 290 - protein, 604 aa, synthetic construct
  REGION 1..604: note = Variant of DNA polymerase
MHHHHHHGGSGMVAPQTKKEEAVLPNINYTIVEEVTEPILADRSALVVEVLGSNYHKAPILGFALANEHGNFFIRTDTALSSPLFTAWLEDESKKKSVFDAKRAIVALKWKGIELRGIEFDLLLASYLLNPSQSTEDVASVAKTKQYMAVQSDEAVYGKGAKQTVPDENVLAEHLVRKAAAIRALEKELIHDLQENEQYALFTDLELPLSSVLAEMEFTGVKVDVERLKEMGEELTEQLRQVEQEIYKLAGQRFNINSPKQLGVILFEKLQLPVLKKTKTGYSTSADVLEKLARQHEIVRKILHYRQLGKLQSTYIEGLLKVVHRDTHKVHTIFNQALTQTGRLSSTEPNLQNIPIRLEEGRKIRQAFVPSKPDWVIFSADYSQIELRVLAHLANDENLIDAFRHDLDIHTKTAMDIFHVTADEVTPNMRRQAKAVNFGIVYGISDYGLSQRLNIPRKEAAEFIRRYFESFPGVKQYMENIVKEAKQKGYVTTLLHRRRYLPDITSRNRNLRSFAERTAMNTPIQGSAADIIKKAMIDLADRLKREKLQARMLLQVHDELILEAPREEVERLQQIVPEVMENAVQLTVPLKVDYHYGPTWYDAK

SEQ ID NO: 291 - DNA, 1812 bp, synthetic construct
  misc_feature 1..1812: note = Variant of DNA polymerase
  source 1..1812: mol_type = other DNA
atgcatcaccatcaccatcacggtggcagcggtatggttgcaccacagaccaaaaaagaagaggccgtactgccgaacatcaattatacaattgtggaggaagtcaccgaaccgattctcgcggatcgttcggcgttagtggttgaggttctggggtccaactaccataaggctccgatcctgggctttgccctggccaatgaacacggtaacttcttcattcgcactgacacggctctttcttctccgctgtttaccgcgtggctggaggatgagagcaagaagaaatcagtattcgacgctaaacgcgcaatcgtggccctgaaatggaaaggcattgaattacgtggcatcgaatttgacttgttgctggcttcatatctcctgaatccctcgcaaagcacggaagatgtcgcaagcgtggccaagaccaaacagtacatggcagtacagagtgatgaggcagtctatggaaaaggtgcgaaacaaacggtgccagatgaaaacgttttagccgaacatctggtgcgtaaagctgctgcaattcgcgccctggagaaagaactgatccacgatttgcaggaaaatgaacaatacgccctgtttactgaccttgaattacctctgtcctcggtcctggcagagatggaatttaccggtgtgaaagtagatgttgaacgcctgaaagaaatgggcgaggagctcacagaacaactgcgccaagtggagcaggaaatctataagttagctggccaacgcttcaacattaacagccctaaacaactgggtgtcattctgtttgaaaaattacagcttcccgtcctgaagaagacgaagaccggctatagtacgagtgctgatgtgctcgagaaacttgcccgtcagcatgaaatcgtccgcaaaattcttcactaccgtcagctcggtaaactgcaatccacatatattgaagggctgctgaaagttgtacatcgcgacacccataaagtccacaccatcttcaaccaggccctgactcaaaccgggcgcctgtcaagcaccgaacctaatctccagaacatcccaattcgtctggaagaaggccgcaaaattcgccaagcatttgtgccatcgaaacctgactgggttatctttagcgcagattactcacagattgagctccgtgttctcgcacacctggcaaacgatgaaaatctgatcgatgcttttcgtcatgaccttgacatccatacgaagacagccatggatattttccatgtaacagcagatgaagttacccccaatatgcgtcgccaagcaaaagccgtgaacttcggtattgtctatgggatctctgattacggtctgagtcagcgtcttggcatcacgcgcaaagaagccgccgaatttattcgtcgttatttcgaaagctttcccggcgttaaacagtacatggagaatattgtaaaagaagccaaacagaaaggatacgtcaccacccttttacaccgccgccgctatctgccagacatcacctctcgtaatcgcaacttacgttcattcgcagaacgcacggccatgaacaccccaattcaaggatcagccgccgacatcatcaagaaggcaatgattgatttagctgatcgtctgaaaaaagagaaacttcaagctcgtatgctgctccaggttcatgacgaactgattcttgaagctcctcgtgaggaagtcgaacgcctgcagcagattgtacccgaggtcatggagaacgccatccagttaaccgtcccactgaaagttgattatcactacggtcctacgtggtacgacgctaag

SEQ ID NO: 292 - protein, 604 aa, synthetic construct
  REGION 1..604: note = Variant of DNA polymerase
MHHHHHHGGSGMVAPQTKKEEAVLPNINYTIVEEVTEPILADRSALVVEVLGSNYHKAPILGFALANEHGNFFIRTDTALSSPLFTAWLEDESKKKSVFDAKRAIVALKWKGIELRGIEFDLLLASYLLNPSQSTEDVASVAKTKQYMAVQSDEAVYGKGAKQTVPDENVLAEHLVRKAAAIRALEKELIHDLQENEQYALFTDLELPLSSVLAEMEFTGVKVDVERLKEMGEELTEQLRQVEQEIYKLAGQRFNINSPKQLGVILFEKLQLPVLKKTKTGYSTSADVLEKLARQHEIVRKILHYRQLGKLQSTYIEGLLKVVHRDTHKVHTIFNQALTQTGRLSSTEPNLQNIPIRLEEGRKIRQAFVPSKPDWVIFSADYSQIELRVLAHLANDENLIDAFRHDLDIHTKTAMDIFHVTADEVTPNMRRQAKAVNFGIVYGISDYGLSQRLGITRKEAAEFIRRYFESFPGVKQYMENIVKEAKQKGYVTTLLHRRRYLPDITSRNRNLRSFAERTAMNTPIQGSAADIIKKAMIDLADRLKKEKLQARMLLQVHDELILEAPREEVERLQQIVPEVMENAIQLTVPLKVDYHYGPTWYDAK

SEQ ID NO: 293 - DNA, 1812 bp, synthetic construct
  misc_feature 1..1812: note = Variant of DNA polymerase
  source 1..1812: mol_type = other DNA
atgcatcaccatcaccatcacggtggcagcggtatggttgcaccacagaccaaaaaagaaatggccgtactgccgaacatcaattatacaattgtggaggaagtcaccgaaccgattctcgcggatcgttcggcgttagtggttgaggttctggggtccaactaccataaggctccgatcctgggctttgccctggccaatgaacacggtaacttcttcattcgcactgacacggctctttcttctccgctgtttaccgcgtggctggaggatgagagcaagaagaaatcagtattcgacgctaaacgcgcaatcgtggccctgaaatggaaaggcattgaattacgtggcatcgaatttgacttgttgctggcttcatatctcctgaatccctcgcaaagcacggaagatgtcgcaagcgtggccaagaccaaacagtacatggcagtacagagtgatgaggcagtctatggaaaaggtgcgaaacaaacggtgccagatgaaaacgttttagccgaacatctggtgcgtaaagctgctgcaattcgcgccctggagaaagaactgatccacgatttgcaggaaaatgaacaatacgccctgtttactgaccttgaattacctctgtcctcggtcctggcagagatggaatttaccggtgtgaaagtagatgttgaacgcctgaaagaaatgggcgaggagctcacagaacaactgcgccaagtggagcaggaaatctataagttagctggccaacgcttcaacattaacagccctaaacaactgggtgtcattctgtttgaaaaattacagcttcccgtcctgaagaagacgaagaccggctatagtacgagtgctgatgtgctcgagaaacttgcccgtcagcatgaaatcgtccgcaaaattcttcactaccgtcagctcggtaaactgcaatccacatatattgaagggctgctgaaagttgtacatcgcgacacccataaagtccacaccatcttcaaccaggccctgactcaaaccgggcgcctgtcaagcaccgaacctaatctccagaacatcccaattcgtctggaagaaggccgcaaaattcgccaagcatttgtgccatcgaaacctgactgggttatctttagcgcagattactcacagattgagctccgtgttctcgcacacctggcaaacgatgaaaatctgatcgatgcttttcgtcatgacctcgacatccatacgaagacagccatggatattttccatgtaacagcagatgaagttacccccaatatgcgtcgccaagcaaaagccgtgaacttcggtattgtctatgggatctctgattacggtctgagtcagcgtcttaacatcccgcgcaaagaagccgccgaatttattcgtcgttatttcgaaagctttcccggcgttaaacagtacatggagaatattgtaaaagaagccaaacagaaaggatacgtcaccacccttttacaccgccgccgctatctgccagacatcacctctcgtaatcgcaacttacgttcattcgcagaacgcacggccatgaacaccccaattcaaggatcagccgccgacatcatcaagaaggcaatgattgatttagctgatcgtctgaaacgcgagaaacttcaagctcgtatgctgctccaggttcatgacgaactgattcttgaagctcctcgtgaggaagtcgaacgcctggttcagattgtacccgaggtcatggagaacgccatccagttaaccgtcccactgaaagttgattatcactacggtcctacgtggtacgacgctaag

SEQ ID NO: 294 - protein, 604 aa, synthetic construct
  REGION 1..604: note = Variant of DNA polymerase
MHHHHHHGGSGMVAPQTKKEMAVLPNINYTIVEEVTEPILADRSALVVEVLGSNYHKAPILGFALANEHGNFFIRTDTALSSPLFTAWLEDESKKKSVFDAKRAIVALKWKGIELRGIEFDLLLASYLLNPSQSTEDVASVAKTKQYMAVQSDEAVYGKGAKQTVPDENVLAEHLVRKAAAIRALEKELIHDLQENEQYALFTDLELPLSSVLAEMEFTGVKVDVERLKEMGEELTEQLRQVEQEIYKLAGQRFNINSPKQLGVILFEKLQLPVLKKTKTGYSTSADVLEKLARQHEIVRKILHYRQLGKLQSTYIEGLLKVVHRDTHKVHTIFNQALTQTGRLSSTEPNLQNIPIRLEEGRKIRQAFVPSKPDWVIFSADYSQIELRVLAHLANDENLIDAFRHDLDIHTKTAMDIFHVTADEVTPNMRRQAKAVNFGIVYGISDYGLSQRLNIPRKEAAEFIRRYFESFPGVKQYMENIVKEAKQKGYVTTLLHRRRYLPDITSRNRNLRSFAERTAMNTPIQGSAADIIKKAMIDLADRLKREKLQARMLLQVHDELILEAPREEVERLVQIVPEVMENAIQLTVPLKVDYHYGPTWYDAK

SEQ ID NO: 295 - DNA, 1812 bp, synthetic construct
  misc_feature 1..1812: note = Variant of DNA polymerase
  source 1..1812: mol_type = other DNA
atgcatcaccatcaccatcacggtggcagcggtatggttgcaccacagaccaaaaaagaagaagccgtactgccgaacatcaattatacaattgtggaggaagtcaccgaaccgattctcgcggatcgttcggcgttagtggttgaggttctggggtccaactaccataaggctccgatcctgggctttgccctggccaatgaacacggtaacttcttcattcgcactgacacggctctttcttctccgctgtttaccgcgtggctggaggatgagagcaagaagaaatcagtattcgacgctaaacgcgcaatcgtggccctgaaatggaaaggcattgaattacgtggcatcgaatttgacttgttgctggcttcatatctcctgaatccctcgcaaagcacggaagatgtcgcaagcgtggccaagaccaaacagtacatggcagtacagagtgatgaggcagtctatggaaaaggtgcgaaacaaacggtgccagatgaaaacgttttagccgaacatctggtgcgtaaagctgctgcaattcgcgccctggagaaagaactgatccacgatttgcaggaaaatgaacaatacgccctgtttactgaccttgaattacctctgtcctcggtcctggcagagatggaatttaccggtgtgaaagtagatgttgaacgcctgaaagaaatgggcgaggagctcacagaacaactgcgccaagtggagcaggaaatctataagttagctggccaagaattcaacattaacagccctaaacaactgggtgtcattctgtttgaaaaattacagcttcccgtcctgaagaagacgaagaccggctatagtacgagtgctgatgtgctcgagaaacttgcccgtcagcatgaaatcgtccgcaaaattcttcactaccgtcagctcggtaaactgcaatccacatatattgaagggctgctgaaagttgtacatcgcgacacccataaagtccacaccatcttcaaccaggccctgactcaaaccgggcgcctgtcaagcaccgaacctaatctccagaacatcccaattcgtctggaagaaggccgcaaaattcgccaagcatttgtgccatcgaaacctgactgggttatctttagcgcagattactcacagattgagctccgtgttctcgcacacctggcaaacgatgaaaatctgatcgatgcttttcgtcatgaccttgacatccatacgaagacagccatggatattttccatgtaacagcagatgaagttacccccaatatgcgtcgccaagcaaaagccgtgaacttcggtattgtctatgggatctctgattacggtctgagtcagcgtcttggcatcccgcgcaaagaagccgccgaatttattcgtcgttatttcgaaagctttcccggcgttaaacagtacatggagaatattgtaaaagaagccaaacagaaaggatacgtcaccacccttttacaccgccgccgctatctgccagacatcacctctcgtaatcgcaacttacgttcattcgcagaacgcacggccatgaacaccccaattcaaggatcagccgccgacatcatcaagaaggcaatgattgatttagctgatcgtctgaaaaaagagaaacttcaagctcgtatgctgctccaggttcatgacgaactgattcttgaagctcctcgtgaggaagtcgaacgcctgcagcagattgtacccgaggtcatggagaacgccatccagttaaccgtcccactgaaagttgattatcactacggtcctacgtggtacgacgctaag

SEQ ID NO: 296 - protein, 604 aa, synthetic construct
  REGION 1..604: note = Variant of DNA polymerase
MHHHHHHGGSGMVAPQTKKEEAVLPNINYTIVEEVTEPILADRSALVVEVLGSNYHKAPILGFALANEHGNFFIRTDTALSSPLFTAWLEDESKKKSVFDAKRAIVALKWKGIELRGIEFDLLLASYLLNPSQSTEDVASVAKTKQYMAVQSDEAVYGKGAKQTVPDENVLAEHLVRKAAAIRALEKELIHDLQENEQYALFTDLELPLSSVLAEMEFTGVKVDVERLKEMGEELTEQLRQVEQEIYKLAGQEFNINSPKQLGVILFEKLQLPVLKKTKTGYSTSADVLEKLARQHEIVRKILHYRQLGKLQSTYIEGLLKVVHRDTHKVHTIFNQALTQTGRLSSTEPNLQNIPIRLEEGRKIRQAFVPSKPDWVIFSADYSQIELRVLAHLANDENLIDAFRHDLDIHTKTAMDIFHVTADEVTPNMRRQAKAVNFGIVYGISDYGLSQRLGIPRKEAAEFIRRYFESFPGVKQYMENIVKEAKQKGYVTTLLHRRRYLPDITSRNRNLRSFAERTAMNTPIQGSAADIIKKAMIDLADRLKKEKLQARMLLQVHDELILEAPREEVERLQQIVPEVMENAIQLTVPLKVDYHYGPTWYDAK

SEQ ID NO: 297 - DNA, 1812 bp, synthetic construct
  misc_feature 1..1812: note = Variant of DNA polymerase
  source 1..1812: mol_type = other DNA
atgcatcaccatcaccatcacggtggcagcggtatggttgcaccacagaccaaaaaagaagaggccgtactgccgaacatcaattatacaattgtggaggaagtcaccgaaccgattctcgcggatcgttcggcgttagtggttgaggttctggggtccaactaccataaggctccgatcctgggctttgccctggccaatgaacacggtaacttcttcattcgcactgacacggctctttcttctccgctgtttaccgcgtggctggaggatgagagcaagaagaaatcagtattcgacgctaaacgcgcaatcgtggccctgaaatggaaaggcattgaattacgtggcatcgaatttgacttgttgctggcttcatatctcctgaatccctcgcaaagcacggaagatgtcgcaagcgtggccaagaccaaacagtacatggcagtacagagtgatgaggcagtctatggaaaaggtgcgaaacaaacggtgccagatgaaaacgttttagccgaacatctggtgcgtaaagctgctgcaattcgcgccctggagaaagaactgatccacgatttgcaggaaaatgaacaatacgccctgtttactgaccttgaattacctctgtcctcggtcctggcagagatggaatttaccggtgtgaaagtagatgttgaacgcctgaaagaaatgggcgaggagctcacagaacaactgcgccaagtggagcaggaaatctataagttagctggccaagagttcaacattaacagccctaaacaactgggtgtcattctgtttgaaaaattacagcttcccgtcctgaagaagacgaagaccggctatagtacgagtgctgatgtgctcgagaaacttgcccgtcagcatgaaatcgtcgagaaaattcttcactaccgtcagctcggtaaactgcaatccacatatattgaagggctgctgaaagttgtacatcgcgacacccataaagtccacaccatcttcaaccaggccctgactcaaaccgggcgcctgtcaagcaccgaacctaatctccagaacatcccaattcgtctggaagaaggccgcaaaattcgccaagcatttgtgccatcgaaacctgactgggttatctttagcgcagattactcacagattgagctccgtgttctcgcacacctggcaaacgatgaaaatctgatcgatgcttttcgtcatgaccttgacatccatacgaagacagccatggatattttccatgtaacagcagatgaagttacccccaatatgcgtcgccaagcaaaagccgtgaacttcggtattgtctatgggatctctgattacggtctgagtcagcgtcttggcatcacgcgcaaagaagccgccgaatttattcgtcgttatttcgaaagctttcccggcgttaaacagtacatggagaatattgtaaaagaagccaaacagaaaggatacgtcaccacccttttacaccgccgccgctatctgccagacatcacctctcgtaatcgcaacttacgttcattcgcagaacgcacggccatgaacaccccaattcaaggatcagccgccgacatcatcaagaaggcaatgattgatttagctggccgtctgaaaaaagagaaacttcaagctcgtatgctgctccaggttcatgacgaactgattcttgaagctcctcgtgaggaagtcgaacgcctggttcagattgtacccgaggtcatggagaacgccgtccagttaaccgtcccactgaaagttgattatcactacggtcctacgtggtacgacgctaag

SEQ ID NO: 298 - protein, 604 aa, synthetic construct
  REGION 1..604: note = Variant of DNA polymerase
MHHHHHHGGSGMVAPQTKKEEAVLPNINYTIVEEVTEPILADRSALVVEVLGSNYHKAPILGFALANEHGNFFIRTDTALSSPLFTAWLEDESKKKSVFDAKRAIVALKWKGIELRGIEFDLLLASYLLNPSQSTEDVASVAKTKQYMAVQSDEAVYGKGAKQTVPDENVLAEHLVRKAAAIRALEKELIHDLQENEQYALFTDLELPLSSVLAEMEFTGVKVDVERLKEMGEELTEQLRQVEQEIYKLAGQEFNINSPKQLGVILFEKLQLPVLKKTKTGYSTSADVLEKLARQHEIVEKILHYRQLGKLQSTYIEGLLKVVHRDTHKVHTIFNQALTQTGRLSSTEPNLQNIPIRLEEGRKIRQAFVPSKPDWVIFSADYSQIELRVLAHLANDENLIDAFRHDLDIHTKTAMDIFHVTADEVTPNMRRQAKAVNFGIVYGISDYGLSQRLGITRKEAAEFIRRYFESFPGVKQYMENIVKEAKQKGYVTTLLHRRRYLPDITSRNRNLRSFAERTAMNTPIQGSAADIIKKAMIDLAGRLKKEKLQARMLLQVHDELILEAPREEVERLVQIVPEVMENAVQLTVPLKVDYHYGPTWYDAK

SEQ ID NO: 299 - DNA, 1812 bp, synthetic construct
  misc_feature 1..1812: note = Variant of DNA polymerase
  source 1..1812: mol_type = other DNA
atgcatcaccatcaccatcacggtggcagcggtatggttgcaccacagaccaaaaaagaagaggccgtactgccgaacatcaattatacaattgtggaggaagtcaccgaaccgattctcgcggatcgttcggcgttagtggttgaggttctggggtccaactaccataaggctccgatcctgggctttgccctggccaatgaacacggtaacttcttcattcgcactgacacggctctttcttctccgctgtttaccgcgtggctggaggatgagagcaagaagaaatcagtattcgacgctaaacgcgcaatcgtggccctgaaatggaaaggcattgaattacgtggcatcgaatttgacttgttgctggcttcatatctcctgaatccctcgcaaagcacggaagatgtcgcaagcgtggccaagaccaaacagtacatggcagtacagcgcgatgaagcagtctatggaaaaggtgcgaaacaaacggtgccagatgaaaacgttttagccgaacatctggtgcgtaaagctgctgcaattcgcgccctggagaaagaactgatccacgatttgcaggaaaatgaacaatacgccctgtttactgaccttgaattacctctgtcctcggtcctggcagagatggaatttaccggtgtgaaagtagatgttgaacgcctgaaagaaatgggcgaggagctcacagaacaactgcgccaagtggagcaggaaatctataagttagctggccaacgcttcaacattaacagccctaaacaactgggtgtcattctgtttgaaaaattacagcttcccgtcctgaagaagacgaagaccggctatagtacgagtgctgatgtgctcgagaaacttgcccgtcagcatgaaatcgtcgagaaaattcttcactaccgtcagctcggtaaactgcaatccacatatattgaagggctgctgaaagttgtacatcgcgacacccataaagtccacaccatcttcaaccaggccctgactcaaaccgggcgcctgtcaagcaccgaacctaatctccagaacatcccaattcgtctggaagaaggccgcaaaattcgccaagcatttgtgccatcgaaacctgactgggttatctttagcgcagattactcacagattgagctccgtgttctcgcacacctggcaaacgatgaaaatctgatcgatgcttttcgtcatgaccttgacatccatacgaagacagccatggatattttccatgtaacagcagatgaagttacccccaatatgcgtcgccaagcaaaagccgtgaacttcggtattgtctatgggatctctgattacggtctgagtcagcgtcttggcatcccgcgcaaagaagccgccgaatttattcgtcgttatttcgaaagctttcccggcgttaaacagtacatggagaatattgtaaaagaagccaaacagaaaggatacgtcaccacccttttacaccgccgccgctatctgccagacatccattctcgtaatcgcaacttacgttcattcgcagaacgcacggccatgaacaccccaattcaaggatcagccgccgacatcatcaagaaggcaatgattgatttagctgatcgtctgaaaaaagagaaacttcaagctcgtatgctgctccaggttcatgacgaactgattcttgaagctcctcgtgaggaagtcgaacgcctggttcagattgtacccgaggtcatggagaacgccatccagttaaccgtcccactgaaagttgattatcactacggtcctacgtggtacgacgctaag

SEQ ID NO: 300 - protein, 604 aa, synthetic construct
  REGION 1..604: note = Variant of DNA polymerase
MHHHHHHGGSGMVAPQTKKEEAVLPNINYTIVEEVTEPILADRSALVVEVLGSNYHKAPILGFALANEHGNFFIRTDTALSSPLFTAWLEDESKKKSVFDAKRAIVALKWKGIELRGIEFDLLLASYLLNPSQSTEDVASVAKTKQYMAVQRDEAVYGKGAKQTVPDENVLAEHLVRKAAAIRALEKELIHDLQENEQYALFTDLELPLSSVLAEMEFTGVKVDVERLKEMGEELTEQLRQVEQEIYKLAGQRFNINSPKQLGVILFEKLQLPVLKKTKTGYSTSADVLEKLARQHEIVEKILHYRQLGKLQSTYIEGLLKVVHRDTHKVHTIFNQALTQTGRLSSTEPNLQNIPIRLEEGRKIRQAFVPSKPDWVIFSADYSQIELRVLAHLANDENLIDAFRHDLDIHTKTAMDIFHVTADEVTPNMRRQAKAVNFGIVYGISDYGLSQRLGIPRKEAAEFIRRYFESFPGVKQYMENIVKEAKQKGYVTTLLHRRRYLPDIHSRNRNLRSFAERTAMNTPIQGSAADIIKKAMIDLADRLKKEKLQARMLLQVHDELILEAPREEVERLVQIVPEVMENAIQLTVPLKVDYHYGPTWYDAK

SEQ ID NO: 301 - DNA, 1812 bp, synthetic construct
  misc_feature 1..1812: note = Variant of DNA polymerase
  source 1..1812: mol_type = other DNA
atgcatcaccatcaccatcacggtggcagcggtatggttgcaccacagaccaaaaaagaaatggccgtactgccgaacatcaattatacaattgtggaggaagtcaccgaaccgattctcgcggatcgttcggcgttagtggttgaggttctggggtccaactaccataaggctccgatcctgggctttgccctggccaatgaacacggtaacttcttcattcgcactgacacggctctttcttctccgctgtttaccgcgtggctggaggatgagagcaagaagaaatcagtattcgacgctaaacgcgcaatcgtggccctgaaatggaaaggcattgaattacgtggcatcgaatttgacttgttgctggcttcatatctcctgaatccctcgcaaagcacggaagatgtcgcaagcgtggccaagaccaaacagtacatggcagtacagagtgatgaggcagtctatggaaaaggtgcgaaacaaacggtgccagatgaaaacgttttagccgaacatctggtgcgtaaagctgctgcaattcgcgccctggagaaagaactgatccacgatttgcaggaaaatgaacaatacgccctgtttactgaccttgaattacctctgtcctcggtcctggcagagatggaatttaccggtgtgaaagtagatgttgaacgcctgaaagaaatgggcgaggagctcacagaacaactgcgccaagtggagcaggaaatctataagttagctggccaagagttcaacattaacagccctaaacaactgggtgtcattctgtttgaaaaattacagcttcccgtcctgaagaagacgaagaccggctatagtacgagtgctgatgtgctcgagaaacttgcccgtcagcatgaaatcgtccgcaaaattcttcactaccgtcagctcggtaaactgcaatccacatatattgaagggctgctgaaagttgtacatcgcgacacccataaagtccacaccatcttcaaccaggccctgactcaaaccgggcgcctgtcaagcaccgaacctaatctccagaacatcccaattcgtctggaagaaggccgcaaaattcgccaagcatttgtgccatcgaaacctgactgggttatctttagcgcagattactcacagattgagctccgtgttctcgcacacctggcaaacgatgaaaatctgatcgatgcttttcgtcatgacctcgacatccatacgaagacagccatggatattttccatgtaacagcagatgaagttacccccaatatgcgtcgccaagcaaaagccgtgaacttcggtattgtctatgggatctctgattacggtctgagtcagcgtcttggcatcacgcgcaaagaagccgccgaatttattcgtcgttatttcgaaagctttcccggcgttaaacagtacatggagaatattgtaaaagaagccaaacagaaaggatacgtcaccacccttttccaccgccgccgctatctgccagacatcacctctcgtaatcgcaacttacgttcattcgcagaacgcacggccatgaacaccccaattcaaggatcagccgccgacatcatcaagaaggcaatgattgatttagctgatcgtctgaaacgcgagaaacttcaagctcgtatgctgctccaggttcatgacgaactgattcttgaagctcctcgtgaggaagtcgaacgcctgcagcagattgtacccgaggtcatggagaacgccatccagttaaccgtcccactgaaagttgattatcactacggtcctacgtggtacgacgctaag

SEQ ID NO: 302 - protein, 604 aa, synthetic construct
  REGION 1..604: note = Variant of DNA polymerase
MHHHHHHGGSGMVAPQTKKEMAVLPNINYTIVEEVTEPILADRSALVVEVLGSNYHKAPILGFALANEHGNFFIRTDTALSSPLFTAWLEDESKKKSVFDAKRAIVALKWKGIELRGIEFDLLLASYLLNPSQSTEDVASVAKTKQYMAVQSDEAVYGKGAKQTVPDENVLAEHLVRKAAAIRALEKELIHDLQENEQYALFTDLELPLSSVLAEMEFTGVKVDVERLKEMGEELTEQLRQVEQEIYKLAGQEFNINSPKQLGVILFEKLQLPVLKKTKTGYSTSADVLEKLARQHEIVRKILHYRQLGKLQSTYIEGLLKVVHRDTHKVHTIFNQALTQTGRLSSTEPNLQNIPIRLEEGRKIRQAFVPSKPDWVIFSADYSQIELRVLAHLANDENLIDAFRHDLDIHTKTAMDIFHVTADEVTPNMRRQAKAVNFGIVYGISDYGLSQRLGITRKEAAEFIRRYFESFPGVKQYMENIVKEAKQKGYVTTLFHRRRYLPDITSRNRNLRSFAERTAMNTPIQGSAADIIKKAMIDLADRLKREKLQARMLLQVHDELILEAPREEVERLQQIVPEVMENAIQLTVPLKVDYHYGPTWYDAK

SEQ ID NO: 303 - DNA, 1812 bp, synthetic construct
  misc_feature 1..1812: note = Variant of DNA polymerase
  source 1..1812: mol_type = other DNA
atgcatcaccatcaccatcacggtggcagcggtatggttgcaccacagaccaaaaaagaagaggccgtactgccgaacatcaattatacaattgtggaggaagtcaccgaaccgattctcgcggatcgttcggcgttagtggttgaggttctggggtccaactaccataaggctccgatcctgggctttgccctggccaatgaacacggtaacttcttcattcgcactgacacggctctttcttctccgctgtttaccgcgtggctggaggatgagagcaagaagaaatcagtattcgacgctaaacgcgcaatcgtggccctgaaatggaaaggcattgaattacgtggcatcgaatttgacttgttgctggcttcatatctcctgaatccctcgcaaagcacggaagatgtcgcaagcgtggccaagaccaaacagtacatggcagtacagagtgatgaggcagtctatggaaaaggtgcgaaacaaacggtgccagatgaaaacgttttagccgaacatctggtgcgtaaagctgctgcaattcgcgccctggagaaagaactgatccacgatttgcaggaaaatgaacaatacgccctgtttactgaccttgaattacctctgtcctcggtcctggcagagatggaatttaccggtgtgaaagtagatgttgaacgcctgaaagaaatgggcgaggagctcacagaacaactgcgccaagtggagcaggaaatctataagttagctggccaagagttcaacattaacagccctaaacaactgggtgtcattctgtttgaaaaattacagcttcccgtcctgaagaagacgaagaccggctatagtacgagtgctgatgtgctcgagaaacttgcccgtcagcatgaaatcgtccgcaaaattcttcactaccgtcagctcggtaaactgcaatccacatatattgaagggctgctgaaagttgtacatcgcgacacccataaagtccacaccatcttcaaccaggccctgactcaaaccgggcgcctgtcaagcaccgaacctaatctccagaacatcccaattcgtctggaagaaggtcgcaaaattcgccaagcatttgtgccatcgaaacctgactgggttatctttagcgcagattactcacagattgagctccgtgttctcgcacacctggcaaacgatgaaaatctgatcgatgcttttcgtcatgaccttgacatccatacgaagacagccatggatattttccatgtaacagcagatgaagttacccccaatatgcgtcgccaagcaaaagccgtgaacttcggtattgtctatgggatctctgattacggtctgagtcagcgtcttaatatcccacgcaaagaagccgccgaatttattcgtcgttatttcgaaagctttcccggcgttaaacagtacatggagaatattgtaaaagaagccaaacagaaaggatacgtcaccacccttttacaccgccgccgctatctgccagacatcacctctcgtaatcgtaacttacgttcattcgcagaacgcacggccatgaacaccccaattcaaggatcagccgccgacatcatcaagaaggcaatgattgatttagctgatcgtctgaaacgcgagaaacttcaagctcgtatgctgctccaggttcatgacgaactgattcttgaagctcctcgtgaggaagtcgaacgcctggttcagattgtacccgaggtcatggagaacgccatccagttaaccgtcccactgaaagttgattatcactacggtcctacgtggtacgacgctaag

SEQ ID NO: 304 - protein, 604 aa, synthetic construct
  REGION 1..604: note = Variant of DNA polymerase
MHHHHHHGGSGMVAPQTKKEEAVLPNINYTIVEEVTEPILADRSALVVEVLGSNYHKAPILGFALANEHGNFFIRTDTALSSPLFTAWLEDESKKKSVFDAKRAIVALKWKGIELRGIEFDLLLASYLLNPSQSTEDVASVAKTKQYMAVQSDEAVYGKGAKQTVPDENVLAEHLVRKAAAIRALEKELIHDLQENEQYALFTDLELPLSSVLAEMEFTGVKVDVERLKEMGEELTEQLRQVEQEIYKLAGQEFNINSPKQLGVILFEKLQLPVLKKTKTGYSTSADVLEKLARQHEIVRKILHYRQLGKLQSTYIEGLLKVVHRDTHKVHTIFNQALTQTGRLSSTEPNLQNIPIRLEEGRKIRQAFVPSKPDWVIFSADYSQIELRVLAHLANDENLIDAFRHDLDIHTKTAMDIFHVTADEVTPNMRRQAKAVNFGIVYGISDYGLSQRLNIPRKEAAEFIRRYFESFPGVKQYMENIVKEAKQKGYVTTLLHRRRYLPDITSRNRNLRSFAERTAMNTPIQGSAADIIKKAMIDLADRLKREKLQARMLLQVHDELILEAPREEVERLVQIVPEVMENAIQLTVPLKVDYHYGPTWYDAK

SEQ ID NO: 305 - DNA, 1812 bp, synthetic construct
  misc_feature 1..1812: note = Variant of DNA polymerase
  source 1..1812: mol_type = other DNA
atgcatcaccatcaccatcacggtggcagcggtatggttgcaccacagaccaaaaaagaagaggccgtactgccgaacatcaattatacaattgtggaggaagtcaccgaaccgattctcgcggatcgttcggcgttagtggttgaggttctggggtccaactaccataaggctccgatcctgggctttgccctggccaatgaacacggtaacttcttcattcgcactgacacggctctttcttctccgctgtttaccgcgtggctggaggatgagagcaagaagaaatcagtattcgacgctaaacgcgcaatcgtggccctgaaatggaaaggcattgaattacgtggcatcgaatttgacttgttgctggcttcatatctcctgaatccctcgcaaagcacggaagatgtcgcaagcgtggccaagaccaaacagtacatggcagtacagagtgattgggcagtctatggaaaaggtgcgaaacaaacggtgccagatgaaaacgttttagccgaacatctggtgcgtaaagctgctgcaattcgcgccctggagaaagaactgatccacgatttgcaggaaaatgaacaatacgccctgtttactgaccttgaattacctctgtcctcggtcctggcagagatggaatttaccggtgtgaaagtagatgttgaacgcctgaaagaaatgggcgaggagctcacagaacaactgcgccaagtggagcaggaaatctataagttagctggccaagagttcaacattaacagccctaaacaactgggtgtcattctgtttgaaaaattacagcttcccgtcctgaagaagacgaagaccggctatagtacgagtgctgatgtgctcgagaaacttgcccgtcagcatgaaatcgtccgcaaaattcttcactaccgtcagctcggtaaactgcaatccacatatattgaagggctgctgaaagttgtacatcgcgacacccataaagtccacaccatcttcaaccaggccctgactcaaaccgggcgcctgtcaagcaccgaacctaatctccagaacatcccaattcgtctggaagaaggccgcaaaattcgccaagcatttgtgccatcgaaacctgactgggttatctttagcgcagattactcacagattgagctccgtgttctcgcacacctggcaaacgatgaaaatctgatcgatgcttttcgtcatgaccttgacatccatacgaagacagccatggatattttccatgtaacagcagatgaagttacccccaatatgcgtcgccaagcaaaagccgtgaacttcggtattgtctatgggatctctgattacggtctgagtcagcgtcttggcatcccgcgcaaagaagccgccgaatttattcgtcgttatttcgaaagctttcccggcgttaaacagtacatggagaatattgtaaaagaagccaaacagaaaggatacgtcaccacccttttacaccgccgccgctatctgccagacatcacctctcgtaatcgcaacttacgttcattcgcagaacgcacggccatgaacaccccaattcaaggatcagccgccgacatcatcaagaaggcaatgattgatttagctgatcgtctgaaaaaagagaaacttcaagctcgtatgctgctccaggttcatgacgaactgattcttgaagctcctcgtgaggaagtcgaacgcctgcagcagattgtacccgaggtcatggagaacgccatccagttaaccgtcccactgaaagttgattatcactacggtcctacgtggtacgacgctaag

SEQ ID NO: 306 - protein, 604 aa, synthetic construct
  REGION 1..604: note = Variant of DNA polymerase
MHHHHHHGGSGMVAPQTKKEEAVLPNINYTIVEEVTEPILADRSALVVEVLGSNYHKAPILGFALANEHGNFFIRTDTALSSPLFTAWLEDESKKKSVFDAKRAIVALKWKGIELRGIEFDLLLASYLLNPSQSTEDVASVAKTKQYMAVQSDWAVYGKGAKQTVPDENVLAEHLVRKAAAIRALEKELIHDLQENEQYALFTDLELPLSSVLAEMEFTGVKVDVERLKEMGEELTEQLRQVEQEIYKLAGQEFNINSPKQLGVILFEKLQLPVLKKTKTGYSTSADVLEKLARQHEIVRKILHYRQLGKLQSTYIEGLLKVVHRDTHKVHTIFNQALTQTGRLSSTEPNLQNIPIRLEEGRKIRQAFVPSKPDWVIFSADYSQIELRVLAHLANDENLIDAFRHDLDIHTKTAMDIFHVTADEVTPNMRRQAKAVNFGIVYGISDYGLSQRLGIPRKEAAEFIRRYFESFPGVKQYMENIVKEAKQKGYVTTLLHRRRYLPDITSRNRNLRSFAERTAMNTPIQGSAADIIKKAMIDLADRLKKEKLQARMLLQVHDELILEAPREEVERLQQIVPEVMENAIQLTVPLKVDYHYGPTWYDAK

SEQ ID NO: 307 - DNA, 1812 bp, synthetic construct
  misc_feature 1..1812: note = Variant of DNA polymerase
  source 1..1812: mol_type = other DNA
atgcatcaccatcaccatcacggtggcagcggtatggttgcaccacagaccaaaaaagaagaggccgtactgccgaacatcaattatacaattgtggaggaagtcaccgaaccgattctcgcggatcgttcggcgttagtggttgaggttctggggtccaactaccataaggctccgatcctgggctttgccctggccaatgaacacggtaacttcttcattcgcactgacacggctctttcttctccgctgtttaccgcgtggctggaggatgagagcaagaagaaatcagtattcgacgctaaacgcgcaatcgtggccctgaaatggaaaggcattgaattacgtggcatcgaatttgacttgttgctggcttcatatctcctgaatccctcgcaaagcacggaagatgtcgcaagcgtggccaagaccaaacagtacatggcagtacagagtgattgggcagtctatggaaaaggtgcgaaacaaacggtgccagatgaaaacgttttagccgaacatctggtgcgtaaagctgctgcaattcgcgccctggagaaagaactgatccacgatttgcaggaaaatgaacaatacgccctgtttactgaccttgaattacctctgtcctcggtcctggcagagatggaatttaccggtgtgaaagtagatgttgaacgcctgaaagaaatgggcgaggagctcacagaacaactgcgccaagtggagcaggaaatctataagttagctggccaacgcttcaacattaacagccctaaacaactgggtgtcattctgtttgaaaaattacagcttcccgtcctgaagaagacgaagaccggctatagtacgagtgctgatgtgctcgagaaacttgcccgtcagcatgaaatcgtccgcaaaattcttcactaccgtcagctcggtaaactgcaatccacatatattgaagggctgctgaaagttgtacatcgcgacacccataaagtccacaccatcttcaaccaggccctgactcaaaccgggcgcctgtcaagcaccgaacctaatctccagaacatcccaattcgtctggaagaaggccgcaaaattcgccaagcatttgtgccatcgaaacctgactgggttatctttagcgcagattactcacagattgagctccgtgttctcgcacacctggcaaacgatgaaaatctgatcgatgcttttcgtcatgaccttgacatccatacgaagacagccatggatattttccatgtaacagcagatgaagttacccccaatatgcgtcgccaagcaaaagccgtgaacttcggtattgtctatgggatctctgattacggtctgagtcagcgtcttaacatcccgcgcaaagaagccgccgaatttattcgtcgttatttcgaaagctttcccggcgttaaacagtacatggagaatattgtaaaagaagccaaacagaaaggatacgtcaccacccttttacaccgccgccgctatctgccagacatcacctctcgtaatcgcaacttacgttcattcgcagaacgcacggccatgaacaccccaattcaaggatcagccgccgacatcatcaagaaggcaatgattgatttagctgatcgtctgaaaaaagagaaacttcaagctcgtatgctgctccaggttcatgacgaactgattcttgaagctcctcgtgaggaagtcgaacgcctgcagcagattgtacccgaggtcatggagaacgccgtccagttaaccgtcccactgaaagttgattatcactacggtcctacgtggtacgacgctaag

SEQ ID NO: 308 - protein, 604 aa, synthetic construct
  REGION 1..604: note = Variant of DNA polymerase
MHHHHHHGGSGMVAPQTKKEEAVLPNINYTIVEEVTEPILADRSALVVEVLGSNYHKAPILGFALANEHGNFFIRTDTALSSPLFTAWLEDESKKKSVFDAKRAIVALKWKGIELRGIEFDLLLASYLLNPSQSTEDVASVAKTKQYMAVQSDWAVYGKGAKQTVPDENVLAEHLVRKAAAIRALEKELIHDLQENEQYALFTDLELPLSSVLAEMEFTGVKVDVERLKEMGEELTEQLRQVEQEIYKLAGQRFNINSPKQLGVILFEKLQLPVLKKTKTGYSTSADVLEKLARQHEIVRKILHYRQLGKLQSTYIEGLLKVVHRDTHKVHTIFNQALTQTGRLSSTEPNLQNIPIRLEEGRKIRQAFVPSKPDWVIFSADYSQIELRVLAHLANDENLIDAFRHDLDIHTKTAMDIFHVTADEVTPNMRRQAKAVNFGIVYGISDYGLSQRLNIPRKEAAEFIRRYFESFPGVKQYMENIVKEAKQKGYVTTLLHRRRYLPDITSRNRNLRSFAERTAMNTPIQGSAADIIKKAMIDLADRLKKEKLQARMLLQVHDELILEAPREEVERLQQIVPEVMENAVQLTVPLKVDYHYGPTWYDAK

SEQ ID NO: 309 - DNA, 1812 bp, synthetic construct
  misc_feature 1..1812: note = Variant of DNA polymerase
  source 1..1812: mol_type = other DNA
atgcatcaccatcaccatcacggtggcagcggtatggttgcaccacagaccaaaaaagaaatggccgtactgccgaacatcaattatacaattgtggaggaagtcaccgaaccgattctcgcggatcgttcggcgttagtggttgaggttctggggtccaactaccataaggctccgatcctgggctttgccctggccaatgaacacggtaacttcttcattcgcactgacacggctctttcttctccgctgtttaccgcgtggctggaggatgagagcaagaagaaatcagtattcgacgctaaacgcgcaatcgtggccctgaaatggaaaggcattgaattacgtggcatcgaatttgacttgttgctggcttcatatctcctgaatccctcgcaaagcacggaagatgtcgcaagcgtggccaagaccaaacagtacatggcagtacagagcgatgaagcagtctatggaaaaggtgcgaaacaaacggtgccagatgaaaacgttttagccgaacatctggtgcgtaaagctgctgcaattcgcgccctggagaaagaactgatccacgatttgcaggaaaatgaacaatacgccctgtttactgaccttgaattacctctgtcctcggtcctggcagagatggaatttaccggtgtgaaagtagatgttgaacgcctgaaagaaatgggcgaggagctcacagaacaactgcgccaagtggagcaggaaatctataagttagctggccaagagttcaacattaacagccctaaacaactgggtgtcattctgtttgaaaaattacagcttcccgtcctgaagaagacgaagaccggctatagtacgagtgctgatgtgctcgagaaacttgcccgtcagcatgaaatcgtccgcaaaattcttcactaccgtcagctcggtaaactgcaatccacatatattgaagggctgctgaaagttgtacatcgcgacacccataaagtccacaccatcttcaaccaggccctgactcaaaccgggcgcctgtcaagcaccgaacctaatctccagaacatcccaattcgtctggaagaaggccgcaaaattcgccaagcatttgtgccatcgaaacctgactgggttatctttagcgcagattactcacagattgagctccgtgttctcgcacacctggcaaacgatgaaaatctgatcgatgcttttcgtcatgaccttgacatccatacgaagacagccatggatattttccatgtaacagcagatgaagttacccccaatatgcgtcgccaagcaaaagccgtgaacttcggtattgtctatgggatctctgattacggtctgagtcagcgtcttaatatcccacgcaaagaagccgccgaatttattcgtcgttatttcgaaagctttcccggcgttaaacagtacatggagaatattgtaaaagaagccaaacagaaaggatacgtcaccacccttttacaccgccgccgctatctgccagacatccattctcgtaatcgcaacttacgttcattcgcagaacgcacggccatgaacaccccaattcaaggatcagccgccgacatcatcaagaaggcaatgattgatttagctgatcgtctgaaacgcgagaaacttcaagctcgtatgctgctccaggttcatgacgaactgattcttgaagctcctcgtgaggaagtcgaacgcctgcagcagattgtacccgaggtcatggagaacgccatccagttaaccgtcccactgaaagttgattatcactacggtcctacgtggtacgacgctaag

SEQ ID NO: 310 - protein, 604 aa, synthetic construct
  REGION 1..604: note = Variant of DNA polymerase
MHHHHHHGGSGMVAPQTKKEMAVLPNINYTIVEEVTEPILADRSALVVEVLGSNYHKAPILGFALANEHGNFFIRTDTALSSPLFTAWLEDESKKKSVFDAKRAIVALKWKGIELRGIEFDLLLASYLLNPSQSTEDVASVAKTKQYMAVQSDEAVYGKGAKQTVPDENVLAEHLVRKAAAIRALEKELIHDLQENEQYALFTDLELPLSSVLAEMEFTGVKVDVERLKEMGEELTEQLRQVEQEIYKLAGQEFNINSPKQLGVILFEKLQLPVLKKTKTGYSTSADVLEKLARQHEIVRKILHYRQLGKLQSTYIEGLLKVVHRDTHKVHTIFNQALTQTGRLSSTEPNLQNIPIRLEEGRKIRQAFVPSKPDWVIFSADYSQIELRVLAHLANDENLIDAFRHDLDIHTKTAMDIFHVTADEVTPNMRRQAKAVNFGIVYGISDYGLSQRLNIPRKEAAEFIRRYFESFPGVKQYMENIVKEAKQKGYVTTLLHRRRYLPDIHSRNRNLRSFAERTAMNTPIQGSAADIIKKAMIDLADRLKREKLQARMLLQVHDELILEAPREEVERLQQIVPEVMENAIQLTVPLKVDYHYGPTWYDAK

SEQ ID NO: 311 - DNA, 1812 bp, synthetic construct
  misc_feature 1..1812: note = Variant of DNA polymerase
  source 1..1812: mol_type = other DNA
atgcatcaccatcaccatcacggtggcagcggtatggttgcaccacagaccaaaaaagaaatggccgtactgccgaacatcaattatacaattgtggaggaagtcaccgaaccgattctcgcggatcgttcggcgttagtggttgaggttctggggtccaactaccataaggctccgatcctgggctttgccctggccaatgaacacggtaacttcttcattcgcactgacacggctctttcttctccgctgtttaccgcgtggctggaggatgagagcaagaagaaatcagtattcgacgctaaacgcgcaatcgtggccctgaaatggaaaggcattgaattacgtggcatcgaatttgacttgttgctggcttcatatctcctgaatccctcgcaaagcacggaagatgtcgcaagcgtggccaagaccaaacagtacatggcagtacagcgcgatgaagcagtctatggaaaaggtgcgaaacaaacggtgccagatgaaaacgttttagccgaacatctggtgcgtaaagctgctgcaattcgcgccctggagaaagaactgatccacgatttgcaggaaaatgaacaatacgccctgtttactgaccttgaattacctctgtcctcggtcctggcagagatggaatttaccggtgtgaaagtagatgttgaacgcctgaaagaaatgggcgaggagctcacagaacaactgcgccaagtggagcaggaaatctataagttagctggccaacgcttcaacattaacagccctaaacaactgggtgtcattctgtttgaaaaattacagcttcccgtcctgaagaagacgaagaccggctatagtacgagtgctgatgtgctcgagaaacttgcccgtcagcatgaaatcgtccgcaaaattcttcactaccgtcagctcggtaaactgcaatccacatatattgaagggctgctgaaagttgtacatcgcgacacccataaagtccacaccatcttcaaccaggccctgactcaaaccgggcgcctgtcaagcaccgaacctaatctccagaacatcccaattcgtctggaagaaggccgcaaaattcgccaagcatttgtgccatcgaaacctgactgggttatctttagcgcagattactcacagattgagctccgtgttctcgcacacctggcaaacgatgaaaatctgatcgatgcttttcgtcatgaccttgacatccatacgaagacagccatggatattttccatgtaacagcagatgaagttacccccaatatgcgtcgccaagcaaaagccgtgaacttcggtattgtctatgggatctctgattacggtctgagtcagcgtcttggcatcacgcgcaaagaagccgccgaatttattcgtcgttatttcgaaagctttcccggcgttaaacagtacatggagaatattgtaaaagaagccaaacagaaaggatacgtcaccacccttttacaccgccgccgctatctgccagacatcacctctcgtaatcgtaacttacgttcattcgcagaacgcacggccatgaacaccccaattcaaggatcagccgccgacatcatcaagaaggcaatgattgatttagctgatcgtctgaaaaaagagaaacttcaagctcgtatgctgctccaggttcatgacgaactgattcttgaagctcctcgtgaggaagtcgaacgcctgcagcagattgtacccgaggtcatggagaacgccatccagttaaccgtcccactgaaagttgattatcactacggtcctacgtggtacgacgctaag

SEQ ID NO: 312 - protein, 604 aa, synthetic construct
  REGION 1..604: note = Variant of DNA polymerase
MHHHHHHGGSGMVAPQTKKEMAVLPNINYTIVEEVTEPILADRSALVVEVLGSNYHKAPILGFALANEHGNFFIRTDTALSSPLFTAWLEDESKKKSVFDAKRAIVALKWKGIELRGIEFDLLLASYLLNPSQSTEDVASVAKTKQYMAVQRDEAVYGKGAKQTVPDENVLAEHLVRKAAAIRALEKELIHDLQENEQYALFTDLELPLSSVLAEMEFTGVKVDVERLKEMGEELTEQLRQVEQEIYKLAGQRFNINSPKQLGVILFEKLQLPVLKKTKTGYSTSADVLEKLARQHEIVRKILHYRQLGKLQSTYIEGLLKVVHRDTHKVHTIFNQALTQTGRLSSTEPNLQNIPIRLEEGRKIRQAFVPSKPDWVIFSADYSQIELRVLAHLANDENLIDAFRHDLDIHTKTAMDIFHVTADEVTPNMRRQAKAVNFGIVYGISDYGLSQRLGITRKEAAEFIRRYFESFPGVKQYMENIVKEAKQKGYVTTLLHRRRYLPDITSRNRNLRSFAERTAMNTPIQGSAADIIKKAMIDLADRLKKEKLQARMLLQVHDELILEAPREEVERLQQIVPEVMENAIQLTVPLKVDYHYGPTWYDAK

SEQ ID NO: 313 - DNA, 1812 bp, synthetic construct
  misc_feature 1..1812: note = Variant of DNA polymerase
  source 1..1812: mol_type = other DNA
atgcatcaccatcaccatcacggtggcagcggtatggttgcaccacagaccaaaaaagaagaagccgtactgccgaacatcaattatacaattgtggaggaagtcaccgaaccgattctcgcggatcgttcggcgttagtggttgaggttctggggtccaactaccataaggctccgatcctgggctttgccctggccaatgaacacggtaacttcttcattcgcactgacacggctctttcttctccgctgtttaccgcgtggctggaggatgagagcaagaagaaatcagtattcgacgctaaacgcgcaatcgtggccctgaaatggaaaggcattgaattacgtggcatcgaatttgacttgttgctggcttcatatctcctgaatccctcgcaaagcacggaagatgtcgcaagcgtggccaagaccaaacagtacatggcagtacagagtgattgggcagtctatggaaaaggtgcgaaacaaacggtgccagatgaaaacgttttagccgaacatctggtgcgtaaagctgctgcaattcgcgccctggagaaagaactgatccacgatttgcaggaaaatgaacaatacgccctgtttactgaccttgaattacctctgtcctcggtcctggcagagatggaatttaccggtgtgaaagtagatgttgaacgcctgaaagaaatgggcgaggagctcacagaacaactgcgccaagtggagcaggaaatctataagttagctggccaacgcttcaacattaacagccctaaacaactgggtgtcattctgtttgaaaaattacagcttcccgtcctgaagaagacgaagaccggctatagtacgagtgctgatgtgctcgagaaacttgcccgtcagcatgaaatcgtccgcaaaattcttcactaccgtcagctcggtaaactgcaatccacatatattgaagggctgctgaaagttgtacatcgcgacacccataaagtccacaccatcttcaaccaggccctgactcaaaccgggcgcctgtcaagcaccgaacctaatctccagaacatcccaattcgtctggaagaaggccgcaaaattcgccaagcatttgtgccatcgaaacctgactgggttatctttagcgcagattactcacagattgagctccgtgttctcgcacacctggcaaacgatgaaaatctgatcgatgcttttcgtcatgaccttgacatccatacgaagacagccatggatattttccatgtaacagcagatgaagttacccccaatatgcgtcgccaagcaaaagccgtgaacttcggtattgtctatgggatctctgattacggtctgagtcagcgtcttaacatcacgcgcaaagaagccgccgaatttattcgtcgttatttcgaaagctttcccggcgttaaacagtacatggagaatattgtaaaagaagccaaacagaaaggatacgtcaccacccttttacaccgccgccgctatctgccagacatcacctctcgtaatcgcaacttacgttcattcgcagaacgcacggccatgaacaccccaattcaaggatcagccgccgacatcatcaagaaggcaatgattgatttagctcgtcgtctgaaacgcgagaaacttcaagctcgtatgctgctccaggttcatgacgaactgattcttgaagctcctcgtgaggaagtcgaacgcctggttcagattgtacccgaggtcatggagaacgccatccagttaaccgtcccactgaaagttgattatcactacggtcctacgtggtacgacgctaag

SEQ ID NO: 314 - protein, 604 aa, synthetic construct
  REGION 1..604: note = Variant of DNA polymerase
MHHHHHHGGSGMVAPQTKKEEAVLPNINYTIVEEVTEPILADRSALVVEVLGSNYHKAPILGFALANEHGNFFIRTDTALSSPLFTAWLEDESKKKSVFDAKRAIVALKWKGIELRGIEFDLLLASYLLNPSQSTEDVASVAKTKQYMAVQSDWAVYGKGAKQTVPDENVLAEHLVRKAAAIRALEKELIHDLQENEQYALFTDLELPLSSVLAEMEFTGVKVDVERLKEMGEELTEQLRQVEQEIYKLAGQRFNINSPKQLGVILFEKLQLPVLKKTKTGYSTSADVLEKLARQHEIVRKILHYRQLGKLQSTYIEGLLKVVHRDTHKVHTIFNQALTQTGRLSSTEPNLQNIPIRLEEGRKIRQAFVPSKPDWVIFSADYSQIELRVLAHLANDENLIDAFRHDLDIHTKTAMDIFHVTADEVTPNMRRQAKAVNFGIVYGISDYGLSQRLNITRKEAAEFIRRYFESFPGVKQYMENIVKEAKQKGYVTTLLHRRRYLPDITSRNRNLRSFAERTAMNTPIQGSAADIIKKAMIDLARRLKREKLQARMLLQVHDELILEAPREEVERLVQIVPEVMENAIQLTVPLKVDYHYGPTWYDAK

SEQ ID NO: 315 - DNA, 1812 bp, synthetic construct
  misc_feature 1..1812: note = Variant of DNA polymerase
  source 1..1812: mol_type = other DNA
atgcatcaccatcaccatcacggtggcagcggtatggttgcaccacagaccaaaaaagaagaggccgtactgccgaacatcaattatacaattgtggaggaagtcaccgaaccgattctcgcggatcgttcggcgttagtggttgaggttctggggtccaactaccataaggctccgatcctgggctttgccctggccaatgaacacggtaacttcttcattcgcactgacacggctctttcttctccgctgtttaccgcgtggctggaggatgagagcaagaagaaatcagtattcgacgctaaacgcgcaatcgtggccctgaaatggaaaggcattgaattacgtggcatcgaatttgacttgttgctggcttcatatctcctgaatccctcgcaaagcacggaagatgtcgcaagcgtggccaagaccaaacagtacatggcagtacagagtgattgggcagtctatggaaaaggtgcgaaacaaacggtgccagatgaaaacgttttagccgaacatctggtgcgtaaagctgctgcaattcgcgccctggagaaagaactgatccacgatttgcaggaaaatgaacaatacgccctgtttactgaccttgaattacctctgtcctcggtcctggcagagatggaatttaccggtgtgaaagtagatgttgaacgcctgaaagaaatgggcgaggagctcacagaacaactgcgccaagtggagcaggaaatctataagttagctggccaagagttcaacattaacagccctaaacaactgggtgtcattctgtttgaaaaattacagcttcccgtcctgaagaagacgaagaccggctatagtacgagtgctgatgtgctcgagaaacttgcccgtcagcatgaaatcgtccgcaaaattcttcactaccgtcagctcggtaaactgcaatccacatatattgaagggctgctgaaagttgtacatcgcgacacccataaagtccacaccatcttcaaccaggccctgactcaaaccgggcgcctgtcaagcaccgaacctaatctccagaacatcccaattcgtctggaagaaggccgcaaaattcgccaagcatttgtgccatcgaaacctgactgggttatctttagcgcagattactcacagattgagctccgtgttctcgcacacctggcaaacgatgaaaatctgatcgatgcttttcgtcatgaccttgacatccatacgaagacagccatggatattttccatgtaacagcagatgaagttacccccaatatgcgtcgccaagcaaaagccgtgaacttcggtattgtctatgggatctctgattacggtctgagtcagcgtcttggcatcccgcgcaaagaagccgccgaatttattcgtcgttatttcgaaagctttcccggcgttaaacagtacatggagaatattgtaaaagaagccaaacagaaaggatacgtcaccacccttttacaccgccgccgctatctgccagacatcacctctcgtaatcgcaacttacgttcattcgcagaacgcacggccatgaacaccccaattcaaggatcagccgccgacatcatcaagaaggcaatgattgatttagctgatcgtctgaaacgcgagaaacttcaagctcgtatgctgctccaggttcatgacgaactgattcttgaagctcctcgtgaggaagtcgaacgcctgcagcagattgtacccgaggtcatggagaacgccatccagttaaccgtcccactgaaagttgattatcactacggtcctacgtggtacgacgctaag

SEQ ID NO: 316 - protein, 604 aa, synthetic construct
  REGION 1..604: note = Variant of DNA polymerase
MHHHHHHGGSGMVAPQTKKEEAVLPNINYTIVEEVTEPILADRSALVVEVLGSNYHKAPILGFALANEHGNFFIRTDTALSSPLFTAWLEDESKKKSVFDAKRAIVALKWKGIELRGIEFDLLLASYLLNPSQSTEDVASVAKTKQYMAVQSDWAVYGKGAKQTVPDENVLAEHLVRKAAAIRALEKELIHDLQENEQYALFTDLELPLSSVLAEMEFTGVKVDVERLKEMGEELTEQLRQVEQEIYKLAGQEFNINSPKQLGVILFEKLQLPVLKKTKTGYSTSADVLEKLARQHEIVRKILHYRQLGKLQSTYIEGLLKVVHRDTHKVHTIFNQALTQTGRLSSTEPNLQNIPIRLEEGRKIRQAFVPSKPDWVIFSADYSQIELRVLAHLANDENLIDAFRHDLDIHTKTAMDIFHVTADEVTPNMRRQAKAVNFGIVYGISDYGLSQRLGIPRKEAAEFIRRYFESFPGVKQYMENIVKEAKQKGYVTTLLHRRRYLPDITSRNRNLRSFAERTAMNTPIQGSAADIIKKAMIDLADRLKREKLQARMLLQVHDELILEAPREEVERLQQIVPEVMENAIQLTVPLKVDYHYGPTWYDAK

SEQ ID NO: 317 - DNA, 1812 bp, synthetic construct
  misc_feature 1..1812: note = Variant of DNA polymerase
  source 1..1812: mol_type = other DNA
atgcatcaccatcaccatcacggtggcagcggtatggttgcaccacagaccaaaaaagaagaggccgtactgccgaacatcaattatacaattgtggaggaagtcaccgaaccgattctcgcggatcgttcggcgttagtggttgaggttctggggtccaactaccataaggctccgatcctgggctttgccctggccaatgaacacggtaacttcttcattcgcactgacacggctctttcttctccgctgtttaccgcgtggctggaggatgagagcaagaagaaatcagtattcgacgctaaacgcgcaatcgtggccctgaaatggaaaggcattgaattacgtggcatcgaatttgacttgttgctggcttcatatctcctgaatccctcgcaaagcacggaagatgtcgcaagcgtggccaagaccaaacagtacatggcagtacagagtgatgaggcagtctatggaaaaggtgcgaaacaaacggtgccagatgaaaacgttttagccgaacatctggtgcgtaaagctgctgcaattcgcgccctggagaaagaactgatccacgatttgcaggaaaatgaacaatacgccctgtttactgaccttgaattacctctgtcctcggtcctggcagagatggaatttaccggtgtgaaagtagatgttgaacgcctgaaagaaatgggcgaggagctcacagaacaactgcgccaagtggagcaggaaatctataagttagctggccaacgcttcaacattaacagccctaaacaactgggtgtcattctgtttgaaaaattacagcttcccgtcctgaagaagacgaagaccggctatagtacgagtgctgatgtgctcgagaaacttgcccgtcagcatgaaatcgtccgcaaaattcttcactaccgtcagctcggtaaactgcaatccacatatattgaagggctgctgaaagttgtacatcgcgacacccataaagtccacaccatcttcaaccaggccctgactcaaaccgggcgcctgtcaagcaccgaacctaatctccagaacatcccaattcgtctggaagaaggccgcaaaattcgccaagcatttgtgccatcgaaacctgactgggttatctttagcgcagattactcacagattgagctccgtgttctcgcacacctggcaaacgatgaaaatctgatcgatgcttttcgtcatgaccttgacatccatacgaagacagccatggatattttccatgtaacagcagatgaagttacccccaatatgcgtcgccaagcaaaagccgtgaacttcggtattgtctatgggatctctgattacggtctgagtcagcgtcttggcatcccgcgcaaagaagccgccgaatttattcgtcgttatttcgaaagctttcccggcgttaaacagtacatggagaatattgtaaaagaagccaaacagaaaggatacgtcaccacccttttacaccgccgccgctatctgccagacatcacctctcgtaatcgcaacttacgttcattcgcagaacgcacggccatgaacaccccaattcaaggatcagccgccgacatcatcaagaaggcaatgattgatttagctcgtcgtctgaaacgcgagaaacttcaagctcgtatgctgctccaggttcatgacgaactgattcttgaagctcctcgtgaggaagtcgaacgcctgcagcagattgtacccgaggtcatggagaacgccatccagttaaccgtcccactgaaagttgattatcactacggtcctacgtggtacgacgctaag

SEQ ID NO: 318 - protein, 604 aa, synthetic construct
  REGION 1..604: note = Variant of DNA polymerase
MHHHHHHGGSGMVAPQTKKEEAVLPNINYTIVEEVTEPILADRSALVVEVLGSNYHKAPILGFALANEHGNFFIRTDTALSSPLFTAWLEDESKKKSVFDAKRAIVALKWKGIELRGIEFDLLLASYLLNPSQSTEDVASVAKTKQYMAVQSDEAVYGKGAKQTVPDENVLAEHLVRKAAAIRALEKELIHDLQENEQYALFTDLELPLSSVLAEMEFTGVKVDVERLKEMGEELTEQLRQVEQEIYKLAGQRFNINSPKQLGVILFEKLQLPVLKKTKTGYSTSADVLEKLARQHEIVRKILHYRQLGKLQSTYIEGLLKVVHRDTHKVHTIFNQALTQTGRLSSTEPNLQNIPIRLEEGRKIRQAFVPSKPDWVIFSADYSQIELRVLAHLANDENLIDAFRHDLDIHTKTAMDIFHVTADEVTPNMRRQAKAVNFGIVYGISDYGLSQRLGIPRKEAAEFIRRYFESFPGVKQYMENIVKEAKQKGYVTTLLHRRRYLPDITSRNRNLRSFAERTAMNTPIQGSAADIIKKAMIDLARRLKREKLQARMLLQVHDELILEAPREEVERLQQIVPEVMENAIQLTVPLKVDYHYGPTWYDAK

SEQ ID NO: 319 - DNA, 1812 bp, synthetic construct
  misc_feature 1..1812: note = Variant of DNA polymerase
  source 1..1812: mol_type = other DNA
atgcatcaccatcaccatcacggtggcagcggtatggttgcaccacagaccaaaaaagaagaggccgtactgccgaacatcaattatacaattgtggaggaagtcaccgaaccgattctcgcggatcgttcggcgttagtggttgaggttctggggtccaactaccataaggctccgatcctgggctttgccctggccaatgaacacggtaacttcttcattcgcactgacacggctctttcttctccgctgtttaccgcgtggctggaggatgagagcaagaagaaatcagtattcgacgctaaacgcgcaatcgtggccctgaaatggaaaggcattgaattacgtggcatcgaatttgacttgttgctggcttcatatctcctgaatccctcgcaaagcacggaagatgtcgcaagcgtggccaagaccaaacagtacatggcagtacagagtgatgaggcagtctatggaaaaggtgcgaaacaaacggtgccagatgaaaacgttttagccgaacatctggtgcgtaaagctgctgcaattcgcgccctggagaaagaactgatccacgatttgcaggaaaatgaacaatacgccctgtttactgaccttgaattacctctgtcctcggtcctggcagagatggaatttaccggtgtgaaagtagatgttgaacgcctgaaagaaatgggcgaggagctcacagaacaactgcgccaagtggagcaggaaatctataagttagctggccaacgcttcaacattaacagccctaaacaactgggtgtcattctgtttgaaaaattacagcttcccgtcctgaagaagacgaagaccggctatagtacgagtgctgatgtgctcgagaaacttgcccgtcagcatgaaatcgtcgagaaaattcttcactaccgtcagctcggtaaactgcaatccacatatattgaagggctgctgaaagttgtacatcgcgacacccataaagtccacaccatcttcaaccaggccctgactcaaaccgggcgcctgtcaagcaccgaacctaatctccagaacatcccaattcgtctggaagaaggccgcaaaattcgccaagcatttgtgccatcgaaacctgactgggttatctttagcgcagattactcacagattgagctccgtgttctcgcacacctggcaaacgatgaaaatctgatcgatgcttttcgtcatgaccttgacatccatacgaagacagccatggatattttccatgtaacagcagatgaagttacccccaatatgcgtcgccaagcaaaagccgtgaacttcggtattgtctatgggatctctgattacggtctgagtcagcgtcttggcatcacgcgcaaagaagccgccgaatttattcgtcgttatttcgaaagctttcccggcgttaaacagtacatggagaatattgtaaaagaagccaaacagaaaggatacgtcaccacccttttacaccgccgccgctatctgccagacatcacctctcgtaatcgcaacttacgttcattcgcagaacgcacggccatgaacaccccaattcaaggatcagccgccgacatcatcaagaaggcaatgattgatttagctggccgtctgaaacgcgagaaacttcaagctcgtatgctgctccaggttcatgacgaactgattcttgaagctcctcgtgaggaagtcgaacgcctgcagcagattgtacccgaggtcatggagaacgccgtccagttaaccgtcccactgaaagttgattatcactacggtcctacgtggtacgacgctaag

SEQ ID NO: 320 - protein, 604 aa, synthetic construct
  REGION 1..604: note = Variant of DNA polymerase
MHHHHHHGGSGMVAPQTKKEEAVLPNINYTIVEEVTEPILADRSALVVEVLGSNYHKAPILGFALANEHGNFFIRTDTALSSPLFTAWLEDESKKKSVFDAKRAIVALKWKGIELRGIEFDLLLASYLLNPSQSTEDVASVAKTKQYMAVQSDEAVYGKGAKQTVPDENVLAEHLVRKAAAIRALEKELIHDLQENEQYALFTDLELPLSSVLAEMEFTGVKVDVERLKEMGEELTEQLRQVEQEIYKLAGQRFNINSPKQLGVILFEKLQLPVLKKTKTGYSTSADVLEKLARQHEIVEKILHYRQLGKLQSTYIEGLLKVVHRDTHKVHTIFNQALTQTGRLSSTEPNLQNIPIRLEEGRKIRQAFVPSKPDWVIFSADYSQIELRVLAHLANDENLIDAFRHDLDIHTKTAMDIFHVTADEVTPNMRRQAKAVNFGIVYGISDYGLSQRLGITRKEAAEFIRRYFESFPGVKQYMENIVKEAKQKGYVTTLLHRRRYLPDITSRNRNLRSFAERTAMNTPIQGSAADIIKKAMIDLAGRLKREKLQARMLLQVHDELILEAPREEVERLQQIVPEVMENAVQLTVPLKVDYHYGPTWYDAK

SEQ ID NO: 321 - DNA, 1812 bp, synthetic construct
  misc_feature 1..1812: note = Variant of DNA polymerase
  source 1..1812: mol_type = other DNA
atgcatcaccatcaccatcacggtggcagcggtatggttgcaccacagaccaaaaaagaaatggccgtactgccgaacatcaattatacaattgtggaggaagtcaccgaaccgattctcgcggatcgttcggcgttagtggttgaggttctggggtccaactaccataaggctccgatcctgggctttgccctggccaatgaacacggtaacttcttcattcgcactgacacggctctttcttctccgctgtttaccgcgtggctggaggatgagagcaagaagaaatcagtattcgacgctaaacgcgcaatcgtggccctgaaatggaaaggcattgaattacgtggcatcgaatttgacttgttgctggcttcatatctcctgaatccctcgcaaagcacggaagatgtcgcaagcgtggccaagaccaaacagtacatggcagtacagagtgatgaggcagtctatggaaaaggtgcgaaacaaacggtgccagatgaaaacgttttagccgaacatctggtgcgtaaagctgctgcaattcgcgccctggagaaagaactgatccacgatttgcaggaaaatgaacaatacgccctgtttactgaccttgaattacctctgtcctcggtcctggcagagatggaatttaccggtgtgaaagtagatgttgaacgcctgaaagaaatgggcgaggagctcacagaacaactgcgccaagtggagcaggaaatctataagttagctggccaagaattcaacattaacagccctaaacaactgggtgtcattctgtttgaaaaattacagcttcccgtcctgaagaagacgaagaccggctatagtacgagtgctgatgtgctcgagaaacttgcccgtcagcatgaaatcgtccgcaaaattcttcactaccgtcagctcggtaaactgcaatccacatatattgaagggctgctgaaagttgtacatcgcgacacccataaagtccacaccatcttcaaccaggccctgactcaaaccgggcgcctgtcaagcaccgaacctaatctccagaacatcccaattcgtctggaagaaggccgcaaaattcgccaagcatttgtgccatcgaaacctgactgggttatctttagcgcagattactcacagattgagctccgtgttctcgcacacctggcaaacgatgaaaatctgatcgatgcttttcgtcatgaccttgacatccatacgaagacagccatggatattttccatgtaacagcagatgaagttacccccaatatgcgtcgccaagcaaaagccgtgaacttcggtattgtctatgggatctctgattacggtctgagtcagcgtcttaacatcccgcgcaaagaagccgccgaatttattcgtcgttatttcgaaagctttcccggcgttaaacagtacatggagaatattgtaaaagaagccaaacagaaaggatacgtcaccacccttttacaccgccgccgctatctgccagacatcacctctcgtaatcgtaacttacgttcattcgcagaacgcacggccatgaacaccccaattcaaggatcagccgccgacatcatcaagaaggcaatgattgatttagctgatcgtctgaaacgcgagaaacttcaagctcgtatgctgctccaggttcatgacgaactgattcttgaagctcctcgtgaggaagtcgaacgcctggttcagattgtacccgaggtcatggagaacgccatccagttaaccgtcccactgaaagttgattatcactacggtcctacgtggtacgacgctaag

SEQ ID NO: 322 - protein, 604 aa, synthetic construct
  REGION 1..604: note = Variant of DNA polymerase
MHHHHHHGGSGMVAPQTKKEMAVLPNINYTIVEEVTEPILADRSALVVEVLGSNYHKAPILGFALANEHGNFFIRTDTALSSPLFTAWLEDESKKKSVFDAKRAIVALKWKGIELRGIEFDLLLASYLLNPSQSTEDVASVAKTKQYMAVQSDEAVYGKGAKQTVPDENVLAEHLVRKAAAIRALEKELIHDLQENEQYALFTDLELPLSSVLAEMEFTGVKVDVERLKEMGEELTEQLRQVEQEIYKLAGQEFNINSPKQLGVILFEKLQLPVLKKTKTGYSTSADVLEKLARQHEIVRKILHYRQLGKLQSTYIEGLLKVVHRDTHKVHTIFNQALTQTGRLSSTEPNLQNIPIRLEEGRKIRQAFVPSKPDWVIFSADYSQIELRVLAHLANDENLIDAFRHDLDIHTKTAMDIFHVTADEVTPNMRRQAKAVNFGIVYGISDYGLSQRLNIPRKEAAEFIRRYFESFPGVKQYMENIVKEAKQKGYVTTLLHRRRYLPDITSRNRNLRSFAERTAMNTPIQGSAADIIKKAMIDLADRLKREKLQARMLLQVHDELILEAPREEVERLVQIVPEVMENAIQLTVPLKVDYHYGPTWYDAK

SEQ ID NO: 323 - DNA, 1812 bp, synthetic construct
  misc_feature 1..1812: note = Variant of DNA polymerase
  source 1..1812: mol_type = other DNA
atgcatcaccatcaccatcacggtggcagcggtatggttgcaccacagaccaaaaaagaagaggccgtactgccgaacatcaattatacaattgtggaggaagtcaccgaaccgattctcgcggatcgttcggcgttagtggttgaggttctggggtccaactaccataaggctccgatcctgggctttgccctggccaatgaacacggtaacttcttcattcgcactgacacggctctttcttctccgctgtttaccgcgtggctggaggatgagagcaagaagaaatcagtattcgacgctaaacgcgcaatcgtggccctgaaatggaaaggcattgaattacgtggcatcgaatttgacttgttgctggcttcatatctcctgaatccctcgcaaagcacggaagatgtcgcaagcgtggccaagaccaaacagtacatggcagtacagagcgatgaagcagtctatggaaaaggtgcgaaacaaacggtgccagatgaaaacgttttagccgaacatctggtgcgtaaagctgctgcaattcgcgccctggagaaagaactgatccacgatttgcaggaaaatgaacaatacgccctgtttactgaccttgaattacctctgtcctcggtcctggcagagatggaatttaccggtgtgaaagtagatgttgaacgcctgaaagaaatgggcgaggagctcacagaacaactgcgccaagtggagcaggaaatctataagttagctggccaagagttcaacattaacagccctaaacaactgggtgtcattctgtttgaaaaattacagcttcccgtcctgaagaagacgaagaccggctatagtacgagtgctgatgtgctcgagaaacttgcccgtcagcatgaaatcgtccgcaaaattcttcactaccgtcagctcggtaaactgcaatccacatatattgaagggctgctgaaagttgtacatcgcgacacccataaagtccacaccatcttcaaccaggccctgactcaaaccgggcgcctgtcaagcaccgaacctaatctccagaacatcccaattcgtctggaagaaggccgcaaaattcgccaagcatttgtgccatcgaaacctgactgggttatctttagcgcagattactcacagattgagctccgtgttctcgcacacctggcaaacgatgaaaatctgatcgatgcttttcgtcatgaccttgacatccatacgaagacagccatggatattttccatgtaacagcagatgaagttacccccaatatgcgtcgccaagcaaaagccgtgaacttcggtattgtctatgggatctctgattacggtctgagtcagcgtcttggcatcacgcgcaaagaagccgccgaatttattcgtcgttatttcgaaagctttcccggcgttaaacagtacatggagaatattgtaaaagaagccaaacagaaaggatacgtcaccacccttttacaccgccgccgctatctgccagacatcacctctcgtaatcgtaacttacgttcattcgcagaacgcacggccatgaacaccccaattcaaggatcagccgccgacatcatcaagaaggcaatgattgatttagctgaccgtctgaaacgcgagaaacttcaagctcgtatgctgctccaggttcatgacgaactgattcttgaagctcctcgtgaggaagtcgaacgcctgcagcagattgtacccgaggtcatggagaacgccatccagttaaccgtcccactgaaagttgattatcactacggtcctacgtggtacgacgctaag

SEQ ID NO: 324 - protein, 604 aa, synthetic construct
  REGION 1..604: note = Variant of DNA polymerase
MHHHHHHGGSGMVAPQTKKEEAVLPNINYTIVEEVTEPILADRSALVVEVLGSNYHKAPILGFALANEHGNFFIRTDTALSSPLFTAWLEDESKKKSVFDAKRAIVALKWKGIELRGIEFDLLLASYLLNPSQSTEDVASVAKTKQYMAVQSDEAVYGKGAKQTVPDENVLAEHLVRKAAAIRALEKELIHDLQENEQYALFTDLELPLSSVLAEMEFTGVKVDVERLKEMGEELTEQLRQVEQEIYKLAGQEFNINSPKQLGVILFEKLQLPVLKKTKTGYSTSADVLEKLARQHEIVRKILHYRQLGKLQSTYIEGLLKVVHRDTHKVHTIFNQALTQTGRLSSTEPNLQNIPIRLEEGRKIRQAFVPSKPDWVIFSADYSQIELRVLAHLANDENLIDAFRHDLDIHTKTAMDIFHVTADEVTPNMRRQAKAVNFGIVYGISDYGLSQRLGITRKEAAEFIRRYFESFPGVKQYMENIVKEAKQKGYVTTLLHRRRYLPDITSRNRNLRSFAERTAMNTPIQGSAADIIKKAMIDLADRLKREKLQARMLLQVHDELILEAPREEVERLQQIVPEVMENAIQLTVPLKVDYHYGPTWYDAK

SEQ ID NO: 325 - DNA, 1812 bp, synthetic construct
  misc_feature 1..1812: note = Variant of DNA polymerase
  source 1..1812: mol_type = other DNA
atgcatcaccatcaccatcacggtggcagcggtatggttgcaccacagaccaaaaaagaagaggccgtactgccgaacatcaattatacaattgtggaggaagtcaccgaaccgattctcgcggatcgttcggcgttagtggttgaggttctggggtccaactaccataaggctccgatcctgggctttgccctggccaatgaacacggtaacttcttcattcgcactgacacggctctttcttctccgctgtttaccgcgtggctggaggatgagagcaagaagaaatcagtattcgacgctaaacgcgcaatcgtggccctgaaatggaaaggcattgaattacgtggcatcgaatttgacttgttgctggcttcatatctcctgaatccctcgcaaagcacggaagatgtcgcaagcgtggccaagaccaaacagtacatggcagtacagagcgatgaagcagtctatggaaaaggtgcgaaacaaacggtgccagatgaaaacgttttagccgaacatctggtgcgtaaagctgctgcaattcgcgccctggagaaagaactgatccacgatttgcaggaaaatgaacaatacgccctgtttactgaccttgaattacctctgtcctcggtcctggcagagatggaatttaccggtgtgaaagtagatgttgaacgcctgaaagaaatgggcgaggagctcacagaacaactgcgccaagtggagcaggaaatctataagttagctggccaagagttcaacattaacagccctaaacaactgggtgtcattctgtttgaaaaattacagcttcccgtcctgaagaagacgaagaccggctatagtacgagtgctgatgtgctcgagaaacttgcccgtcagcatgaaatcgtccgcaaaattcttcactaccgtcagctcggtaaactgcaatccacatatattgaagggctgctgaaagttgtacatcgcgacacccataaagtccacaccatcttcaaccaggccctgactcaaaccgggcgcctgtcaagcaccgaacctaatctccagaacatcccaattcgtctggaagaaggccgcaaaattcgccaagcatttgtgccatcgaaacctgactgggttatctttagcgcagattactcacagattgagctccgtgttctcgcacacctggcaaacgatgaaaatctgatcgatgcttttcgtcatgaccttgacatccatacgaagacagccatggatattttccatgtaacagcagatgaagttacccccaatatgcgtcgccaagcaaaagccgtgaacttcggtattgtctatgggatctctgattacggtctgagtcagcgtcttggcatcccgcgcaaagaagccgccgaatttattcgtcgttatttcgaaagctttcccggcgttaaacagtacatggagaatattgtaaaagaagccaaacagaaaggatacgtcaccacccttttacaccgccgccgctatctgccagacatcacctctcgtaatcgtaacttacgttcattcgcagaacgcacggccatgaacaccccaattcaaggatcagccgccgacatcatcaagaaggcaatgattgatttagctgatcgtctgaaacgcgagaaacttcaagctcgtatgctgctccaggttcatgacgaactgattcttgaagctcctcgtgaggaagtcgaacgcctgcagcagattgtacccgaggtcatggagaacgccatccagttaaccgtcccactgaaagttgattatcactacggtcctacgtggtacgacgctaag

SEQ ID NO: 326 - protein, 604 aa, synthetic construct
  REGION 1..604: note = Variant of DNA polymerase
MHHHHHHGGSGMVAPQTKKEEAVLPNINYTIVEEVTEPILADRSALVVEVLGSNYHKAPILGFALANEHGNFFIRTDTALSSPLFTAWLEDESKKKSVFDAKRAIVALKWKGIELRGIEFDLLLASYLLNPSQSTEDVASVAKTKQYMAVQSDEAVYGKGAKQTVPDENVLAEHLVRKAAAIRALEKELIHDLQENEQYALFTDLELPLSSVLAEMEFTGVKVDVERLKEMGEELTEQLRQVEQEIYKLAGQEFNINSPKQLGVILFEKLQLPVLKKTKTGYSTSADVLEKLARQHEIVRKILHYRQLGKLQSTYIEGLLKVVHRDTHKVHTIFNQALTQTGRLSSTEPNLQNIPIRLEEGRKIRQAFVPSKPDWVIFSADYSQIELRVLAHLANDENLIDAFRHDLDIHTKTAMDIFHVTADEVTPNMRRQAKAVNFGIVYGISDYGLSQRLGIPRKEAAEFIRRYFESFPGVKQYMENIVKEAKQKGYVTTLLHRRRYLPDITSRNRNLRSFAERTAMNTPIQGSAADIIKKAMIDLADRLKREKLQARMLLQVHDELILEAPREEVERLQQIVPEVMENAIQLTVPLKVDYHYGPTWYDAK

SEQ ID NO: 327 - DNA, 1812 bp, synthetic construct
  misc_feature 1..1812: note = Variant of DNA polymerase
  source 1..1812: mol_type = other DNA
atgcatcaccatcaccatcacggtggcagcggtatggttgcaccacagaccaaaaaagaagaggccgtactgccgaacatcaattatacaattgtggaggaagtcaccgaaccgattctcgcggatcgttcggcgttagtggttgaggttctggggtccaactaccataaggctccgatcctgggctttgccctggccaatgaacacggtaacttcttcattcgcactgacacggctctttcttctccgctgtttaccgcgtggctggaggatgagagcaagaagaaatcagtattcgacgctaaacgcgcaatcgtggccctgaaatggaaaggcattgaattacgtggcatcgaatttgacttgttgctggcttcatatctcctgaatccctcgcaaagcacggaagatgtcgcaagcgtggccaagaccaaacagtacatggcagtacagagtgattgggcagtctatggaaaaggtgcgaaacaaacggtgccagatgaaaacgttttagccgaacatctggtgcgtaaagctgctgcaattcgcgccctggagaaagaactgatccacgatttgcaggaaaatgaacaatacgccctgtttactgaccttgaattacctctgtcctcggtcctggcagagatggaatttaccggtgtgaaagtagatgttgaacgcctgaaagaaatgggcgaggagctcacagaacaactgcgccaagtggagcaggaaatctataagttagctggccaacgcttcaacattaacagccctaaacaactgggtgtcattctgtttgaaaaattacagcttcccgtcctgaagaagacgaagaccggctatagtacgagtgctgatgtgctcgagaaacttgcccgtcagcatgaaatcgtccgcaaaattcttcactaccgtcagctcggtaaactgcaatccacatatattgaagggctgctgaaagttgtacatcgcgacacccataaagtccacaccatcttcaaccaggccctgactcaaaccgggcgcctgtcaagcaccgaacctaatctccagaacatcccaattcgtctggaagaaggccgcaaaattcgccaagcatttgtgccatcgaaacctgactgggttatctttagcgcagattactcacagattgagctccgtgttctcgcacacctggcaaacgatgaaaatctgatcgatgcttttcgccatgaccttgacatccatacgaagacagccatggatattttccatgtaacagcagatgaagttacccccaatatgcgtcgccaagcaaaagccgtgaacttcggtattgtctatgggatctctgattacggtctgagtcagcgtcttggcatcacgcgcaaagaagccgccgaatttattcgtcgttatttcgaaagctttcccggcgttaaacagtacatggagaatattgtaaaagaagccaaacagaaaggatacgtcaccacccttttacaccgccgccgctatctgccagacatcacctctcgtaatcgcaacttacgttcattcgcagaacgcacggccatgaacaccccaattcaaggatcagccgccgacatcatcaagaaggcaatgattgatttagctgatcgtctgaaacgcgagaaacttcaagctcgtatgctgctccaggttcatgacgaactgattcttgaagctcctcgtgaggaagtcgaacgcctgcagcagattgtacccgaggtcatggagaacgccatccagttaaccgtcccactgaaagttgattatcactacggtcctacgtggtacgacgctaag

SEQ ID NO: 328 - protein, 604 aa, synthetic construct
  REGION 1..604: note = Variant of DNA polymerase
MHHHHHHGGSGMVAPQTKKEEAVLPNINYTIVEEVTEPILADRSALVVEVLGSNYHKAPILGFALANEHGNFFIRTDTALSSPLFTAWLEDESKKKSVFDAKRAIVALKWKGIELRGIEFDLLLASYLLNPSQSTEDVASVAKTKQYMAVQSDWAVYGKGAKQTVPDENVLAEHLVRKAAAIRALEKELIHDLQENEQYALFTDLELPLSSVLAEMEFTGVKVDVERLKEMGEELTEQLRQVEQEIYKLAGQRFNINSPKQLGVILFEKLQLPVLKKTKTGYSTSADVLEKLARQHEIVRKILHYRQLGKLQSTYIEGLLKVVHRDTHKVHTIFNQALTQTGRLSSTEPNLQNIPIRLEEGRKIRQAFVPSKPDWVIFSADYSQIELRVLAHLANDENLIDAFRHDLDIHTKTAMDIFHVTADEVTPNMRRQAKAVNFGIVYGISDYGLSQRLGITRKEAAEFIRRYFESFPGVKQYMENIVKEAKQKGYVTTLLHRRRYLPDITSRNRNLRSFAERTAMNTPIQGSAADIIKKAMIDLADRLKREKLQARMLLQVHDELILEAPREEVERLQQIVPEVMENAIQLTVPLKVDYHYGPTWYDAK

SEQ ID NO: 329 - DNA, 1812 bp, synthetic construct
  misc_feature 1..1812: note = Variant of DNA polymerase
  source 1..1812: mol_type = other DNA
atgcatcaccatcaccatcacggtggcagcggtatggttgcaccacagaccaaaaaagaagaggccgtactgccgaacatcaattatacaattgtggaggaagtcaccgaaccgattctcgcggatcgttcggcgttagtggttgaggttctggggtccaactaccataaggctccgatcctgggctttgccctggccaatgaacacggtaacttcttcattcgcactgacacggctctttcttctccgctgtttaccgcgtggctggaggatgagagcaagaagaaatcagtattcgacgctaaacgcgcaatcgtggccctgaaatggaaaggcattgaattacgtggcatcgaatttgacttgttgctggcttcatatctcctgaatccctcgcaaagcacggaagatgtcgcaagcgtggccaagaccaaacagtacatggcagtacagagtgattgggcagtctatggaaaaggtgcgaaacaaacggtgccagatgaaaacgttttagccgaacatctggtgcgtaaagctgctgcaattcgcgccctggagaaagaactgatccacgatttgcaggaaaatgaacaatacgccctgtttactgaccttgaattacctctgtcctcggtcctggcagagatggaatttaccggtgtgaaagtagatgttgaacgcctgaaagaaatgggcgaggagctcacagaacaactgcgccaagtggagcaggaaatctataagttagctggccaagaattcaacattaacagccctaaacaactgggtgtcattctgtttgaaaaattacagcttcccgtcctgaagaagacgaagaccggctatagtacgagtgctgatgtgctcgagaaacttgcccgtcagcatgaaatcgtcgagaaaattcttcactaccgtcagctcggtaaactgcaatccacatatattgaagggctgctgaaagttgtacatcgcgacacccataaagtccacaccatcttcaaccaggccctgactcaaaccgggcgcctgtcaagcaccgaacctaatctccagaacatcccaattcgtctggaagaaggccgcaaaattcgccaagcatttgtgccatcgaaacctgactgggttatctttagcgcagattactcacagattgagctccgtgttctcgcacacctggcaaacgatgaaaatctgatcgatgcttttcgtcatgaccttgacatccatacgaagacagccatggatattttccatgtaacagcagatgaagttacccccaatatgcgtcgccaagcaaaagccgtgaacttcggtattgtctatgggatctctgattacggtctgagtcagcgtcttaacatcacgcgcaaagaagccgccgaatttattcgtcgttatttcgaaagctttcccggcgttaaacagtacatggagaatattgtaaaagaagccaaacagaaaggatacgtcaccacccttttacaccgccgccgctatctgccagacatccattctcgtaatcgcaacttacgttcattcgcagaacgcacggccatgaacaccccaattcaaggatcagccgccgacatcatcaagaaggcaatgattgatttagctgatcgtctgaaacgcgagaaacttcaagctcgtatgctgctccaggttcatgacgaactgattcttgaagctcctcgtgaggaagtcgaacgcctgcagcagattgtacccgaggtcatggagaacgccatccagttaaccgtcccactgaaagttagctatcactacggtcctacgtggtacgacgctaag

SEQ ID NO: 330 - protein, 604 aa, synthetic construct
  REGION 1..604: note = Variant of DNA polymerase
MHHHHHHGGSGMVAPQTKKEEAVLPNINYTIVEEVTEPILADRSALVVEVLGSNYHKAPILGFALANEHGNFFIRTDTALSSPLFTAWLEDESKKKSVFDAKRAIVALKWKGIELRGIEFDLLLASYLLNPSQSTEDVASVAKTKQYMAVQSDWAVYGKGAKQTVPDENVLAEHLVRKAAAIRALEKELIHDLQENEQYALFTDLELPLSSVLAEMEFTGVKVDVERLKEMGEELTEQLRQVEQEIYKLAGQEFNINSPKQLGVILFEKLQLPVLKKTKTGYSTSADVLEKLARQHEIVEKILHYRQLGKLQSTYIEGLLKVVHRDTHKVHTIFNQALTQTGRLSSTEPNLQNIPIRLEEGRKIRQAFVPSKPDWVIFSADYSQIELRVLAHLANDENLIDAFRHDLDIHTKTAMDIFHVTADEVTPNMRRQAKAVNFGIVYGISDYGLSQRLNITRKEAAEFIRRYFESFPGVKQYMENIVKEAKQKGYVTTLLHRRRYLPDIHSRNRNLRSFAERTAMNTPIQGSAADIIKKAMIDLADRLKREKLQARMLLQVHDELILEAPREEVERLQQIVPEVMENAIQLTVPLKVSYHYGPTWYDAK

SEQ ID NO: 331 - DNA, 1812 bp, synthetic construct
  misc_feature 1..1812: note = Variant of DNA polymerase
  source 1..1812: mol_type = other DNA
atgcatcaccatcaccatcacggtggcagcggtatggttgcaccacagaccaaaaaagaagaagccgtactgccgaacatcaattatacaattgtggaggaagtcaccgaaccgattctcgcggatcgttcggcgttagtggttgaggttctggggtccaactaccataaggctccgatcctgggctttgccctggccaatgaacacggtaacttcttcattcgcactgacacggctctttcttctccgctgtttaccgcgtggctggaggatgagagcaagaagaaatcagtattcgacgctaaacgcgcaatcgtggccctgaaatggaaaggcattgaattacgtggcatcgaatttgacttgttgctggcttcatatctcctgaatccctcgcaaagcacggaagatgtcgcaagcgtggccaagaccaaacagtacatggcagtacagagtgatgaggcagtctatggaaaaggtgcgaaacaaacggtgccagatgaaaacgttttagccgaacatctggtgcgtaaagctgctgcaattcgcgccctggagaaagaactgatccacgatttgcaggaaaatgaacaatacgccctgtttactgaccttgaattacctctgtcctcggtcctggcagagatggaatttaccggtgtgaaagtagatgttgaacgcctgaaagaaatgggcgaggagctcacagaacaactgcgccaagtggagcaggaaatctataagttagctggccaagagttcaacattaacagccctaaacaactgggtgtcattctgtttgaaaaattacagcttcccgtcctgaagaagacgaagaccggctatagtacgagtgctgatgtgctcgagaaacttgcccgtcagcatgaaatcgtcgagaaaattcttcactaccgtcagctcggtaaactgcaatccacatatattgaagggctgctgaaagttgtacatcgcgacacccataaagtccacaccatcttcaaccaggccctgactcaaaccgggcgcctgtcaagcaccgaacctaatctccagaacatcccaattcgtctggaagaaggccgcaaaattcgccaagcatttgtgccatcgaaacctgactgggttatctttagcgcagattactcacagattgagctccgtgttctcgcacacctggcaaacgatgaaaatctgatcgatgcttttcgtcatgaccttgacatccatacgaagacagccatggatattttccatgtaacagcagatgaagttacccccaatatgcgtcgccaagcaaaagccgtgaacttcggtattgtctatgggatctctgattacggtctgagtcagcgtcttggcatcacgcgcaaagaagccgccgaatttattcgtcgttatttcgaaagctttcccggcgttaaacagtacatggagaatattgtaaaagaagccaaacagaaaggatacgtcaccacccttttacaccgccgccgctatctgccagacatccattctcgtaatcgcaacttacgttcattcgcagaacgcacggccatgaacaccccaattcaaggatcagccgccgacatcatcaagaaggcaatgattgatttagctgatcgtctgaaacgcgagaaacttcaagctcgtatgctgctccaggttcatgacgaactgattcttgaagctcctcgtgaggaagtcgaacgcctgcagcagattgtacccgaggtcatggagaacgccatccagttaaccgtcccactgaaagttgattatcactacggtcctacgtggtacgacgctaag

SEQ ID NO: 332 - protein, 604 aa, synthetic construct
  REGION 1..604: note = Variant of DNA polymerase
MHHHHHHGGSGMVAPQTKKEEAVLPNINYTIVEEVTEPILADRSALVVEVLGSNYHKAPILGFALANEHGNFFIRTDTALSSPLFTAWLEDESKKKSVFDAKRAIVALKWKGIELRGIEFDLLLASYLLNPSQSTEDVASVAKTKQYMAVQSDEAVYGKGAKQTVPDENVLAEHLVRKAAAIRALEKELIHDLQENEQYALFTDLELPLSSVLAEMEFTGVKVDVERLKEMGEELTEQLRQVEQEIYKLAGQEFNINSPKQLGVILFEKLQLPVLKKTKTGYSTSADVLEKLARQHEIVEKILHYRQLGKLQSTYIEGLLKVVHRDTHKVHTIFNQALTQTGRLSSTEPNLQNIPIRLEEGRKIRQAFVPSKPDWVIFSADYSQIELRVLAHLANDENLIDAFRHDLDIHTKTAMDIFHVTADEVTPNMRRQAKAVNFGIVYGISDYGLSQRLGITRKEAAEFIRRYFESFPGVKQYMENIVKEAKQKGYVTTLLHRRRYLPDIHSRNRNLRSFAERTAMNTPIQGSAADIIKKAMIDLADRLKREKLQARMLLQVHDELILEAPREEVERLQQIVPEVMENAIQLTVPLKVDYHYGPTWYDAK

SEQ ID NO: 333 - DNA, 1812 bp, synthetic construct
  misc_feature 1..1812: note = Variant of DNA polymerase
  source 1..1812: mol_type = other DNA
atgcatcaccatcaccatcacggtggcagcggtatggttgcaccacagaccaaaaaagaagaagccgtactgccgaacatcaattatacaattgtggaggaagtcaccgaaccgattctcgcggatcgttcggcgttagtggttgaggttctggggtccaactaccataaggctccgatcctgggctttgccctggccaatgaacacggtaacttcttcattcgcactgacacggctctttcttctccgctgtttaccgcgtggctggaggatgagagcaagaagaaatcagtattcgacgctaaacgcgcaatcgtggccctgaaatggaaaggcattgaattacgtggcatcgaatttgacttgttgctggcttcatatctcctgaatccctcgcaaagcacggaagatgtcgcaagcgtggccaagaccaaacagtacatggcagtacagagtgatgaggcagtctatggaaaaggtgcgaaacaaacggtgccagatgaaaacgttttagccgaacatctggtgcgtaaagctgctgcaattcgcgccctggagaaagaactgatccacgatttgcaggaaaatgaacaatacgccctgtttactgaccttgaattacctctgtcctcggtcctggcagagatggaatttaccggtgtgaaagtagatgttgaacgcctgaaagaaatgggcgaggagctcacagaacaactgcgccaagtggagcaggaaatctataagttagctggccaacgcttcaacattaacagccctaaacaactgggtgtcattctgtttgaaaaattacagcttcccgtcctgaagaagacgaagaccggctatagtacgagtgctgatgtgctcgagaaacttgcccgtcagcatgaaatcgtcgagaaaattcttcactaccgtcagctcggtaaactgcaatccacatatattgaagggctgctgaaagttgtacatcgcgacacccataaagtccacaccatcttcaaccaggccctgactcaaaccgggcgcctgtcaagcaccgaacctaatctccagaacatcccaattcgtctggaagaaggccgcaaaattcgccaagcatttgtgccatcgaaacctgactgggttatctttagcgcagattactcacagattgagctccgtgttctcgcacacctggcaaacgatgaaaatctgatcgatgcttttcgtcatgaccttgacatccatacgaagacagccatggatattttccatgtaacagcagatgaagttacccccaatatgcgtcgccaagcaaaagccgtgaacttcggtattgtctatgggatctctgattacggtctgagtcagcgtcttggcatcacgcgcaaagaagccgccgaatttattcgtcgttatttcgaaagctttcccggcgttaaacagtacatggagaatattgtaaaagaagccaaacagaaaggatacgtcaccacccttttacaccgccgccgctatctgccagacatcacctctcgtaatcgtaacttacgttcattcgcagaacgcacggccatgaacaccccaattcaaggatcagccgccgacatcatcaagaaggcaatgattgatttagctgatcgtctgaaacgcgagaaacttcaagctcgtatgctgctccaggttcatgacgaactgattcttgaagctcctcgtgaggaagtcgaacgcctgcagcagattgtacccgaggtcatggagaacgccgtccagttaaccgtcccactgaaagttgattatcactacggtcctacgtggtacgacgctaag

SEQ ID NO: 334 - protein, 604 aa, synthetic construct
  REGION 1..604: note = Variant of DNA polymerase
MHHHHHHGGSGMVAPQTKKEEAVLPNINYTIVEEVTEPILADRSALVVEVLGSNYHKAPILGFALANEHGNFFIRTDTALSSPLFTAWLEDESKKKSVFDAKRAIVALKWKGIELRGIEFDLLLASYLLNPSQSTEDVASVAKTKQYMAVQSDEAVYGKGAKQTVPDENVLAEHLVRKAAAIRALEKELIHDLQENEQYALFTDLELPLSSVLAEMEFTGVKVDVERLKEMGEELTEQLRQVEQEIYKLAGQRFNINSPKQLGVILFEKLQLPVLKKTKTGYSTSADVLEKLARQHEIVEKILHYRQLGKLQSTYIEGLLKVVHRDTHKVHTIFNQALTQTGRLSSTEPNLQNIPIRLEEGRKIRQAFVPSKPDWVIFSADYSQIELRVLAHLANDENLIDAFRHDLDIHTKTAMDIFHVTADEVTPNMRRQAKAVNFGIVYGISDYGLSQRLGITRKEAAEFIRRYFESFPGVKQYMENIVKEAKQKGYVTTLLHRRRYLPDITSRNRNLRSFAERTAMNTPIQGSAADIIKKAMIDLADRLKREKLQARMLLQVHDELILEAPREEVERLQQIVPEVMENAVQLTVPLKVDYHYGPTWYDAK

SEQ ID NO: 335 - DNA, 1812 bp, synthetic construct
  misc_feature 1..1812: note = Variant of DNA polymerase
  source 1..1812: mol_type = other DNA
atgcatcaccatcaccatcacggtggcagcggtatggttgcaccacagaccaaaaaagaagaggccgtactgccgaacatcaattatacaattgtggaggaagtcaccgaaccgattctcgcggatcgttcggcgttagtggttgaggttctggggtccaactaccataaggctccgatcctgggctttgccctggccaatgaacacggtaacttcttcattcgcactgacacggctctttcttctccgctgtttaccgcgtggctggaggatgagagcaagaagaaatcagtattcgacgctaaacgcgcaatcgtggccctgaaatggaaaggcattgaattacgtggcatcgaatttgacttgttgctggcttcatatctcctgaatccctcgcaaagcacggaagatgtcgcaagcgtggccaagaccaaacagtacatggcagtacagagtgattgggcagtctatggaaaaggtgcgaaacaaacggtgccagatgaaaacgttttagccgaacatctggtgcgtaaagctgctgcaattcgcgccctggagaaagaactgatccacgatttgcaggaaaatgaacaatacgccctgtttactgaccttgaattacctctgtcctcggtcctggcagagatggaatttaccggtgtgaaagtagatgttgaacgcctgaaagaaatgggcgaggagctcacagaacaactgcgccaagtggagcaggaaatctataagttagctggccaacgcttcaacattaacagccctaaacaactgggtgtcattctgtttgaaaaattacagcttcccgtcctgaagaagacgaagaccggctatagtacgagtgctgatgtgctcgagaaacttgcccgtcagcatgaaatcgtccgcaaaattcttcactaccgtcagctcggtaaactgcaatccacatatattgaagggctgctgaaagttgtacatcgcgacacccataaagtccacaccatcttcaaccaggccctgactcaaaccgggcgcctgtcaagcaccgaacctaatctccagaacatcccaattcgtctggaagaaggccgcaaaattcgccaagcatttgtgccatcgaaacctgactgggttatctttagcgcagattactcacagattgagctccgtgttctcgcacacctggcaaacgatgaaaatctgatcgatgcttttcgtcatgaccttgacatccatacgaagacagccatggatattttccatgtaacagcagatgaagttacccccaatatgcgtcgccaagcaaaagccgtgaacttcggtattgtctatgggatctctgattacggtctgagtcagcgtcttaacatcccgcgcaaagaagccgccgaatttattcgtcgttatttcgaaagctttcccggcgttaaacagtacatggagaatattgtaaaagaagccaaacagaaaggatacgtcaccacccttttacaccgccgccgctatctgccagacatcacctctcgtaatcgtaacttacgttcattcgcagaacgcacggccatgaacaccccaattcaaggatcagccgccgacatcatcaagaaggcaatgattgatttagctgatcgtctgaaacgcgagaaacttcaagctcgtatgctgctccaggttcatgacgaactgattcttgaagctcctcgtgaggaagtcgaacgcctgcagcagattgtacccgaggtcatggagaacgccatccagttaaccgtcccactgaaagttgattatcactacggtcctacgtggtacgacgctaag

SEQ ID NO: 336 - protein, 604 aa, synthetic construct
  REGION 1..604: note = Variant of DNA polymerase
MHHHHHHGGSGMVAPQTKKEEAVLPNINYTIVEEVTEPILADRSALVVEVLGSNYHKAPILGFALANEHGNFFIRTDTALSSPLFTAWLEDESKKKSVFDAKRAIVALKWKGIELRGIEFDLLLASYLLNPSQSTEDVASVAKTKQYMAVQSDWAVYGKGAKQTVPDENVLAEHLVRKAAAIRALEKELIHDLQENEQYALFTDLELPLSSVLAEMEFTGVKVDVERLKEMGEELTEQLRQVEQEIYKLAGQRFNINSPKQLGVILFEKLQLPVLKKTKTGYSTSADVLEKLARQHEIVRKILHYRQLGKLQSTYIEGLLKVVHRDTHKVHTIFNQALTQTGRLSSTEPNLQNIPIRLEEGRKIRQAFVPSKPDWVIFSADYSQIELRVLAHLANDENLIDAFRHDLDIHTKTAMDIFHVTADEVTPNMRRQAKAVNFGIVYGISDYGLSQRLNIPRKEAAEFIRRYFESFPGVKQYMENIVKEAKQKGYVTTLLHRRRYLPDITSRNRNLRSFAERTAMNTPIQGSAADIIKKAMIDLADRLKREKLQARMLLQVHDELILEAPREEVERLQQIVPEVMENAIQLTVPLKVDYHYGPTWYDAK

SEQ ID NO: 337 - DNA, 1812 bp, synthetic construct
  misc_feature 1..1812: note = Variant of DNA polymerase
  source 1..1812: mol_type = other DNA
atgcatcaccatcaccatcacggtggcagcggtatggttgcaccacagaccaaaaaagaagaggccgtactgccgaacatcaattatacaattgtggaggaagtcaccgaaccgattctcgcggatcgttcggcgttagtggttgaggttctggggtccaactaccataaggctccgatcctgggctttgccctggccaatgaacacggtaacttcttcattcgcactgacacggctctttcttctccgctgtttaccgcgtggctggaggatgagagcaagaagaaatcagtattcgacgctaaacgcgcaatcgtggccctgaaatggaaaggcattgaattacgtggcatcgaatttgacttgttgctggcttcatatctcctgaatccctcgcaaagcacggaagatgtcgcaagcgtggccaagaccaaacagtacatggcagtacagagtgatgaggcagtctatggaaaaggtgcgaaacaaacggtgccagatgaaaacgttttagccgaacatctggtgcgtaaagctgctgcaattcgcgccctggagaaagaactgatccacgatttgcaggaaaatgaacaatacgccctgtttactgaccttgaattacctctgtcctcggtcctggcagagatggaatttaccggtgtgaaagtagatgttgaacgcctgaaagaaatgggcgaggagctcacagaacaactgcgccaagtggagcaggaaatctataagttagctggccaacgcttcaacattaacagccctaaacaactgggtgtcattctgtttgaaaaattacagcttcccgtcctgaagaagacgaagaccggctatagtacgagtgctgatgtgctcgagaaacttgcccgtcagcatgaaatcgtcgagaaaattcttcactaccgtcagctcggtaaactgcaatccacatatattgaagggctgctgaaagttgtacatcgcgacacccataaagtccacaccatcttcaaccaggccctgactcaaaccgggcgcctgtcaagcaccgaacctaatctccagaacatcccaattcgtctggaagaaggccgcaaaattcgccaagcatttgtgccatcgaaacctgactgggttatctttagcgcagattactcacagattgagctccgtgttctcgcacacctggcaaacgatgaaaatctgatcgatgcttttcgtcatgaccttgacatccatacgaagacagccatggatattttccatgtaacagcagatgaagttacccccaatatgcgtcgccaagcaaaagccgtgaacttcggtattgtctatgggatctctgattacggtctgagtcagcgtcttaacatcacgcgcaaagaagccgccgaatttattcgtcgttatttcgaaagctttcccggcgttaaacagtacatggagaatattgtaaaagaagccaaacagaaaggatacgtcaccacccttttacaccgccgccgctatctgccagacatccattctcgtaatcgcaacttacgttcattcgcagaacgcacggccatgaacaccccaattcaaggatcagccgccgacatcatcaagaaggcaatgattgatttagctgatcgtctgaaacgcgagaaacttcaagctcgtatgctgctccaggttcatgacgaactgattcttgaagctcctcgtgaggaagtcgaacgcctgcagcagattgtacccgaggtcatggagaacgccgtccagttaaccgtcccactgaaagttgattatcactacggtcctacgtggtacgacgctaag

SEQ ID NO: 338 - protein, 604 aa, synthetic construct
  REGION 1..604: note = Variant of DNA polymerase
MHHHHHHGGSGMVAPQTKKEEAVLPNINYTIVEEVTEPILADRSALVVEVLGSNYHKAPILGFALANEHGNFFIRTDTALSSPLFTAWLEDESKKKSVFDAKRAIVALKWKGIELRGIEFDLLLASYLLNPSQSTEDVASVAKTKQYMAVQSDEAVYGKGAKQTVPDENVLAEHLVRKAAAIRALEKELIHDLQENEQYALFTDLELPLSSVLAEMEFTGVKVDVERLKEMGEELTEQLRQVEQEIYKLAGQRFNINSPKQLGVILFEKLQLPVLKKTKTGYSTSADVLEKLARQHEIVEKILHYRQLGKLQSTYIEGLLKVVHRDTHKVHTIFNQALTQTGRLSSTEPNLQNIPIRLEEGRKIRQAFVPSKPDWVIFSADYSQIELRVLAHLANDENLIDAFRHDLDIHTKTAMDIFHVTADEVTPNMRRQAKAVNFGIVYGISDYGLSQRLNITRKEAAEFIRRYFESFPGVKQYMENIVKEAKQKGYVTTLLHRRRYLPDIHSRNRNLRSFAERTAMNTPIQGSAADIIKKAMIDLADRLKREKLQARMLLQVHDELILEAPREEVERLQQIVPEVMENAVQLTVPLKVDYHYGPTWYDAK

SEQ ID NO: 339 - DNA, 1812 bp, synthetic construct
  misc_feature 1..1812: note = Variant of DNA polymerase
  source 1..1812: mol_type = other DNA
atgcatcaccatcaccatcacggtggcagcggtatggttgcaccacagaccaaaaaagaagaggccgtactgccgaacatcaattatacaattgtggaggaagtcaccgaaccgattctcgcggatcgttcggcgttagtggttgaggttctggggtccaactaccataaggctccgatcctgggctttgccctggccaatgaacacggtaacttcttcattcgcactgacacggctctttcttctccgctgtttaccgcgtggctggaggatgagagcaagaagaaatcagtattcgacgctaaacgcgcaatcgtggccctgaaatggaaaggcattgaattacgtggcatcgaatttgacttgttgctggcttcatatctcctgaatccctcgcaaagcacggaagatgtcgcaagcgtggccaagaccaaacagtacatggcagtacagagtgatgaggcagtctatggaaaaggtgcgaaacaaacggtgccagatgaaaacgttttagccgaacatctggtgcgtaaagctgctgcaattcgcgccctggagaaagaactgatccacgatttgcaggaaaatgaacaatacgccctgtttactgaccttgaattacctctgtcctcggtcctggcagagatggaatttaccggtgtgaaagtagatgttgaacgcctgaaagaaatgggcgaggagctcacagaacaactgcgccaagtggagcaggaaatctataagttagctggccaagaattcaacattaacagccctaaacaactgggtgtcattctgtttgaaaaattacagcttcccgtcctgaagaagacgaagaccggctatagtacgagtgctgatgtgctcgagaaacttgcccgtcagcatgaaatcgtcgagaaaattcttcactaccgtcagctcggtaaactgcaatccacatatattgaagggctgctgaaagttgtacatcgcgacacccataaagtccacaccatcttcaaccaggccctgactcaaaccgggcgcctgtcaagcaccgaacctaatctccagaacatcccaattcgtctggaagaaggccgcaaaattcgccaagcatttgtgccatcgaaacctgactgggttatctttagcgcagattactcacagattgagctccgtgttctcgcacacctggcaaacgatgaaaatctgatcgatgcttttcgtcatgaccttgacatccatacgaagacagccatggatattttccatgtaacagcagatgaagttacccccaatatgcgtcgccaagcaaaagccgtgaacttcggtattgtctatgggatctctgattacggtctgagtcagcgtcttggcatcacgcgcaaagaagccgccgaatttattcgtcgttatttcgaaagctttcccggcgttaaacagtacatggagaatattgtaaaagaagccaaacagaaaggatacgtcaccacccttttacaccgccgccgctatctgccagacatcacctctcgtaatcgcaacttacgttcattcgcagaacgcacggccatgaacaccccaattcaaggatcagccgccgacatcatcaagaaggcaatgattgatttagctgatcgtctgaaacgcgagaaacttcaagctcgtatgctgctccaggttcatgacgaactgattcttgaagctcctcgtgaggaagtcgaacgcctgcagcagattgtacccgaggtcatggagaacgccatccagttaaccgtcccactgaaagttgattatcactacggtcctacgtggtacgacgctaag

SEQ ID NO: 340 - protein, 604 aa, synthetic construct
  REGION 1..604: note = Variant of DNA polymerase
MHHHHHHGGSGMVAPQTKKEEAVLPNINYTIVEEVTEPILADRSALVVEVLGSNYHKAPILGFALANEHGNFFIRTDTALSSPLFTAWLEDESKKKSVFDAKRAIVALKWKGIELRGIEFDLLLASYLLNPSQSTEDVASVAKTKQYMAVQSDEAVYGKGAKQTVPDENVLAEHLVRKAAAIRALEKELIHDLQENEQYALFTDLELPLSSVLAEMEFTGVKVDVERLKEMGEELTEQLRQVEQEIYKLAGQEFNINSPKQLGVILFEKLQLPVLKKTKTGYSTSADVLEKLARQHEIVEKILHYRQLGKLQSTYIEGLLKVVHRDTHKVHTIFNQALTQTGRLSSTEPNLQNIPIRLEEGRKIRQAFVPSKPDWVIFSADYSQIELRVLAHLANDENLIDAFRHDLDIHTKTAMDIFHVTADEVTPNMRRQAKAVNFGIVYGISDYGLSQRLGITRKEAAEFIRRYFESFPGVKQYMENIVKEAKQKGYVTTLLHRRRYLPDITSRNRNLRSFAERTAMNTPIQGSAADIIKKAMIDLADRLKREKLQARMLLQVHDELILEAPREEVERLQQIVPEVMENAIQLTVPLKVDYHYGPTWYDAK

SEQ ID NO: 341 - DNA, 1812 bp, synthetic construct
  misc_feature 1..1812: note = Variant of DNA polymerase
  source 1..1812: mol_type = other DNA
atgcatcaccatcaccatcacggtggcagcggtatggttgcaccacagaccaaaaaagaagaagccgtactgccgaacatcaattatacaattgtggaggaagtcaccgaaccgattctcgcggatcgttcggcgttagtggttgaggttctggggtccaactaccataaggctccgatcctgggctttgccctggccaatgaacacggtaacttcttcattcgcactgacacggctctttcttctccgctgtttaccgcgtggctggaggatgagagcaagaagaaatcagtattcgacgctaaacgcgcaatcgtggccctgaaatggaaaggcattgaattacgtggcatcgaatttgacttgttgctggcttcatatctcctgaatccctcgcaaagcacggaagatgtcgcaagcgtggccaagaccaaacagtacatggcagtacagagtgattgggcagtctatggaaaaggtgcgaaacaaacggtgccagatgaaaacgttttagccgaacatctggtgcgtaaagctgctgcaattcgcgccctggagaaagaactgatccacgatttgcaggaaaatgaacaatacgccctgtttactgaccttgaattacctctgtcctcggtcctggcagagatggaatttaccggtgtgaaagtagatgttgaacgcctgaaagaaatgggcgaggagctcacagaacaactgcgccaagtggagcaggaaatctataagttagctggccaagaattcaacattaacagccctaaacaactgggtgtcattctgtttgaaaaattacagcttcccgtcctgaagaagacgaagaccggctatagtacgagtgctgatgtgctcgagaaacttgcccgtcagcatgaaatcgtcgagaaaattcttcactaccgtcagctcggtaaactgcaatccacatatattgaagggctgctgaaagttgtacatcgcgacacccataaagtccacaccatcttcaaccaggccctgactcaaaccgggcgcctgtcaagcaccgaacctaatctccagaacatcccaattcgtctggaagaaggccgcaaaattcgccaagcatttgtgccatcgaaacctgactgggttatctttagcgcagattactcacagattgagctccgtgttctcgcacacctggcaaacgatgaaaatctgatcgatgcttttcgtcatgaccttgacatccatacgaagacagccatggatattttccatgtaacagcagatgaagttacccccaatatgcgtcgccaagcaaaagccgtgaacttcggtattgtctatgggatctctgattacggtctgagtcagcgtcttggcatcccgcgcaaagaagccgccgaatttattcgtcgttatttcgaaagctttcccggcgttaaacagtacatggagaatattgtaaaagaagccaaacagaaaggatacgtcaccacccttttacaccgccgccgctatctgccagacatcacctctcgtaatcgcaacttacgttcattcgcagaacgcacggccatgaacaccccaattcaaggatcagccgccgacatcatcaagaaggcaatgattgatttagctgatcgtctgaaacgcgagaaacttcaagctcgtatgctgctccaggttcatgacgaactgattcttgaagctcctcgtgaggaagtcgaacgcctgcagcagattgtacccgaggtcatggagaacgccatccagttaaccgtcccactgaaagttgattatcactacggtcctacgtggtacgacgctaag

SEQ ID NO: 342 - protein, 604 aa, synthetic construct
  REGION 1..604: note = Variant of DNA polymerase
MHHHHHHGGSGMVAPQTKKEEAVLPNINYTIVEEVTEPILADRSALVVEVLGSNYHKAPILGFALANEHGNFFIRTDTALSSPLFTAWLEDESKKKSVFDAKRAIVALKWKGIELRGIEFDLLLASYLLNPSQSTEDVASVAKTKQYMAVQSDWAVYGKGAKQTVPDENVLAEHLVRKAAAIRALEKELIHDLQENEQYALFTDLELPLSSVLAEMEFTGVKVDVERLKEMGEELTEQLRQVEQEIYKLAGQEFNINSPKQLGVILFEKLQLPVLKKTKTGYSTSADVLEKLARQHEIVEKILHYRQLGKLQSTYIEGLLKVVHRDTHKVHTIFNQALTQTGRLSSTEPNLQNIPIRLEEGRKIRQAFVPSKPDWVIFSADYSQIELRVLAHLANDENLIDAFRHDLDIHTKTAMDIFHVTADEVTPNMRRQAKAVNFGIVYGISDYGLSQRLGIPRKEAAEFIRRYFESFPGVKQYMENIVKEAKQKGYVTTLLHRRRYLPDITSRNRNLRSFAERTAMNTPIQGSAADIIKKAMIDLADRLKREKLQARMLLQVHDELILEAPREEVERLQQIVPEVMENAIQLTVPLKVDYHYGPTWYDAK

SEQ ID NO: 343 - DNA, 1812 bp, synthetic construct
  misc_feature 1..1812: note = Variant of DNA polymerase
  source 1..1812: mol_type = other DNA
atgcatcaccatcaccatcacggtggcagcggtatggttgcaccacagaccaaaaaagaagaagccgtactgccgaacatcaattatacaattgtggaggaagtcaccgaaccgattctcgcggatcgttcggcgttagtggttgaggttctggggtccaactaccataaggctccgatcctgggctttgccctggccaatgaacacggtaacttcttcattcgcactgacacggctctttcttctccgctgtttaccgcgtggctggaggatgagagcaagaagaaatcagtattcgacgctaaacgcgcaatcgtggccctgaaatggaaaggcattgaattacgtggcatcgaatttgacttgttgctggcttcatatctcctgaatccctcgcaaagcacggaagatgtcgcaagcgtggccaagaccaaacagtacatggcagtacagagtgatgaggcagtctatggaaaaggtgcgaaacaaacggtgccagatgaaaacgttttagccgaacatctggtgcgtaaagctgctgcaattcgcgccctggagaaagaactgatccacgatttgcaggaaaatgaacaatacgccctgtttactgaccttgaattacctctgtcctcggtcctggcagagatggaatttaccggtgtgaaagtagatgttgaacgcctgaaagaaatgggcgaggagctcacagaacaactgcgccaagtggagcaggaaatctataagttagctggccaagagttcaacattaacagccctaaacaactgggtgtcattctgtttgaaaaattacagcttcccgtcctgaagaagacgaagaccggctatagtacgagtgctgatgtgctcgagaaacttgcccgtcagcatgaaatcgtcgagaaaattcttcactaccgtcagctcggtaaactgcaatccacatatattgaagggctgctgaaagttgtacatcgcgacacccataaagtccacaccatcttcaaccaggccctgactcaaaccgggcgcctgtcaagcaccgaacctaatctccagaacatcccaattcgtctggaagaaggccgcaaaattcgccaagcatttgtgccatcgaaacctgactgggttatctttagcgcagattactcacagattgagctccgtgttctcgcacacctggcaaacgatgaaaatctgatcgatgcttttcgtcatgaccttgacatccatacgaagacagccatggatattttccatgtaacagcagatgaagttacccccaatatgcgtcgccaagcaaaagccgtgaacttcggtattgtctatgggatctctgattacggtctgagtcagcgtcttaacatcccgcgcaaagaagccgccgaatttattcgtcgttatttcgaaagctttcccggcgttaaacagtacatggagaatattgtaaaagaagccaaacagaaaggatacgtcaccacccttttacaccgccgccgctatctgccagacatcacctctcgtaatcgtaacttacgttcattcgcagaacgcacggccatgaacaccccaattcaaggatcagccgccgacatcatcaagaaggcaatgattgatttagctgaccgtctgaaacgcgagaaacttcaagctcgtatgctgctccaggttcatgacgaactgattcttgaagctcctcgtgaggaagtcgaacgcctgcagcagattgtacccgaggtcatggagaacgccgtccagttaaccgtcccactgaaagttgattatcactacggtcctacgtggtacgacgctaag

SEQ ID NO: 344 - protein, 604 aa, synthetic construct
  REGION 1..604: note = Variant of DNA polymerase
MHHHHHHGGSGMVAPQTKKEEAVLPNINYTIVEEVTEPILADRSALVVEVLGSNYHKAPILGFALANEHGNFFIRTDTALSSPLFTAWLEDESKKKSVFDAKRAIVALKWKGIELRGIEFDLLLASYLLNPSQSTEDVASVAKTKQYMAVQSDEAVYGKGAKQTVPDENVLAEHLVRKAAAIRALEKELIHDLQENEQYALFTDLELPLSSVLAEMEFTGVKVDVERLKEMGEELTEQLRQVEQEIYKLAGQEFNINSPKQLGVILFEKLQLPVLKKTKTGYSTSADVLEKLARQHEIVEKILHYRQLGKLQSTYIEGLLKVVHRDTHKVHTIFNQALTQTGRLSSTEPNLQNIPIRLEEGRKIRQAFVPSKPDWVIFSADYSQIELRVLAHLANDENLIDAFRHDLDIHTKTAMDIFHVTADEVTPNMRRQAKAVNFGIVYGISDYGLSQRLNIPRKEAAEFIRRYFESFPGVKQYMENIVKEAKQKGYVTTLLHRRRYLPDITSRNRNLRSFAERTAMNTPIQGSAADIIKKAMIDLADRLKREKLQARMLLQVHDELILEAPREEVERLQQIVPEVMENAVQLTVPLKVDYHYGPTWYDAK

SEQ ID NO: 345 - DNA, 1812 bp, synthetic construct
  misc_feature 1..1812: note = Variant of DNA polymerase
  source 1..1812: mol_type = other DNA
atgcatcaccatcaccatcacggtggcagcggtatggttgcaccacagaccaaaaaagaagaggccgtactgccgaacatcaattatacaattgtggaggaagtcaccgaaccgattctcgcggatcgttcggcgttagtggttgaggttctggggtccaactaccataaggctccgatcctgggctttgccctggccaatgaacacggtaacttcttcattcgcactgacacggctctttcttctccgctgtttaccgcgtggctggaggatgagagcaagaagaaatcagtattcgacgctaaacgcgcaatcgtggccctgaaatggaaaggcattgaattacgtggcatcgaatttgacttgttgctggcttcatatctcctgaatccctcgcaaagcacggaagatgtcgcaagcgtggccaagaccaaacagtacatggcagtacagagtgatgaggcagtctatggaaaaggtgcgaaacaaacggtgccagatgaaaacgttttagccgaacatctggtgcgtaaagctgctgcaattcgcgccctggagaaagaactgatccacgatttgcaggaaaatgaacaatacgccctgtttactgaccttgaattacctctgtcctcggtcctggcagagatggaatttaccggtgtgaaagtagatgttgaacgcctgaaagaaatgggcgaggagctcacagaacaactgcgccaagtggagcaggaaatctataagttagctggccaagaattcaacattaacagccctaaacaactgggtgtcattctgtttgaaaaattacagcttcccgtcctgaagaagacgaagaccggctatagtacgagtgctgatgtgctcgagaaacttgcccgtcagcatgaaatcgtcgagaaaattcttcactaccgtcagctcggtaaactgcaatccacatatattgaagggctgctgaaagttgtacatcgcgacacccataaagtccacaccatcttcaaccaggccctgactcaaaccgggcgcctgtcaagcaccgaacctaatctccagaacatcccaattcgtctggaagaaggccgcaaaattcgccaagcatttgtgccatcgaaacctgactgggttatctttagcgcagattactcacagattgagctccgtgttctcgcacacctggcaaacgatgaaaatctgatcgatgcttttcgtcatgaccttgacatccatacgaagacagccatggatattttccatgtaacagcagatgaagttacccccaatatgcgtcgcaaagcaaaagccgtgaacttcggtattgtctatgggatctctgattacggtctgagtcagcgtcttaatatcccacgcaaagaagccgccgaatttattcgtcgttatttcgaaagctttcccggcgttaaacagtacatggagaatattgtaaaagaagccaaacagaaaggatacgtcaccacccttttacaccgccgccgctatctgccagacatccattctcgtaatcgcaacttacgttcattcgcagaacgcacggccatgaacaccccaattcaaggatcagccgccgacatcatcaagaaggcaatgattgatttagctgatcgtctgaaacgcgagaaacttcaagctcgtatgctgctccaggttcatgacgaactgattcttgaagctcctcgtgaggaagtcgaacgcctggttcagattgtacccgaggtcatggagaacgccatccagttaaccgtcccactgaaagttgattatcactacggtcctacgtggtacgacgctaag

SEQ ID NO: 346 - protein, 604 aa, synthetic construct
  REGION 1..604: note = Variant of DNA polymerase
MHHHHHHGGSGMVAPQTKKEEAVLPNINYTIVEEVTEPILADRSALVVEVLGSNYHKAPILGFALANEHGNFFIRTDTALSSPLFTAWLEDESKKKSVFDAKRAIVALKWKGIELRGIEFDLLLASYLLNPSQSTEDVASVAKTKQYMAVQSDEAVYGKGAKQTVPDENVLAEHLVRKAAAIRALEKELIHDLQENEQYALFTDLELPLSSVLAEMEFTGVKVDVERLKEMGEELTEQLRQVEQEIYKLAGQEFNINSPKQLGVILFEKLQLPVLKKTKTGYSTSADVLEKLARQHEIVEKILHYRQLGKLQSTYIEGLLKVVHRDTHKVHTIFNQALTQTGRLSSTEPNLQNIPIRLEEGRKIRQAFVPSKPDWVIFSADYSQIELRVLAHLANDENLIDAFRHDLDIHTKTAMDIFHVTADEVTPNMRRKAKAVNFGIVYGISDYGLSQRLNIPRKEAAEFIRRYFESFPGVKQYMENIVKEAKQKGYVTTLLHRRRYLPDIHSRNRNLRSFAERTAMNTPIQGSAADIIKKAMIDLADRLKREKLQARMLLQVHDELILEAPREEVERLVQIVPEVMENAIQLTVPLKVDYHYGPTWYDAK

SEQ ID NO: 347 - DNA, 1812 bp, synthetic construct
  misc_feature 1..1812: note = Variant of DNA polymerase
  source 1..1812: mol_type = other DNA
atgcatcaccatcaccatcacggtggcagcggtatggttgcaccacagaccaaaaaagaagaggccgtactgccgaacatcaattatacaattgtggaggaagtcaccgaaccgattctcgcggatcgttcggcgttagtggttgaggttctggggtccaactaccataaggctccgatcctgggctttgccctggccaatgaacacggtaacttcttcattcgcactgacacggctctttcttctccgctgtttaccgcgtggctggaggatgagagcaagaagaaatcagtattcgacgctaaacgcgcaatcgtggccctgaaatggaaaggcattgaattacgtggcatcgaatttgacttgttgctggcttcatatctcctgaatccctcgcaaagcacggaagatgtcgcaagcgtggccaagaccaaacagtacatggcagtacagagtgatgaggcagtctatggaaaaggtgcgaaacaaacggtgccagatgaaaacgttttagccgaacatctggtgcgtaaagctgctgcaattcgcgccctggagaaagaactgatccacgatttgcaggaaaatgaacaatacgccctgtttactgaccttgaattacctctgtcctcggtcctggcagagatggaatttaccggtgtgaaagtagatgttgaacgcctgaaagaaatgggcgaggagctcacagaacaactgcgccaagtggagcaggaaatctataagttagctggccaagagttcaacattaacagccctaaacaactgggtgtcattctgtttgaaaaattacagcttcccgtcctgaagaagacgaagaccggctatagtacgagtgctgatgtgctcgagaaacttgcccgtcagcatgaaatcgtcgagaaaattcttcactaccgtcagctcggtaaactgcaatccacatatattgaagggctgctgaaagttgtacatcgcgacacccataaagtccacaccatcttcaaccaggccctgactcaaaccgggcgcctgtcaagcaccgaacctaatctccagaacatcccaattcgtctggaagaaggccgcaaaattcgccaagcatttgtgccatcgaaacctgactgggttatctttagcgcagattactcacagattgagctccgtgttctcgcacacctggcaaacgatgaaaatctgatcgatgcttttcgtcatgaccttgacatccatacgaagacagccatggatattttccatgtaacagcagatgaagttacccccaatatgcgtcgccaagcaaaagccgtgaacttcggtattgtctatgggatctctgattacggtctgagtcagcgtcttaacatcacgcgcaaagaagccgccgaatttattcgtcgttatttcgaaagctttcccggcgttaaacagtacatggagaatattgtaaaagaagccaaacagaaaggatacgtcaccacccttttacaccgccgccgctatctgccagacatcacctctcgtaatcgcaacttacgttcattcgcagaacgcacggccatgaacaccccaattcaaggatcagccgccgacatcatcaagaaggcaatgattgatttagctgatcgtctgaaacgcgagaaacttcaagctcgtatgctgctccaggttcatgacgaactgattcttgaagctcctcgtgaggaagtcgaacgcctgcagcagattgtacccgaggtcatggagaacgccgtccagttaaccgtcccactgaaagttgattatcactacggtcctacgtggtacgacgctaag

SEQ ID NO: 348 - protein, 604 aa, synthetic construct
  REGION 1..604: note = Variant of DNA polymerase
MHHHHHHGGSGMVAPQTKKEEAVLPNINYTIVEEVTEPILADRSALVVEVLGSNYHKAPILGFALANEHGNFFIRTDTALSSPLFTAWLEDESKKKSVFDAKRAIVALKWKGIELRGIEFDLLLASYLLNPSQSTEDVASVAKTKQYMAVQSDEAVYGKGAKQTVPDENVLAEHLVRKAAAIRALEKELIHDLQENEQYALFTDLELPLSSVLAEMEFTGVKVDVERLKEMGEELTEQLRQVEQEIYKLAGQEFNINSPKQLGVILFEKLQLPVLKKTKTGYSTSADVLEKLARQHEIVEKILHYRQLGKLQSTYIEGLLKVVHRDTHKVHTIFNQALTQTGRLSSTEPNLQNIPIRLEEGRKIRQAFVPSKPDWVIFSADYSQIELRVLAHLANDENLIDAFRHDLDIHTKTAMDIFHVTADEVTPNMRRQAKAVNFGIVYGISDYGLSQRLNITRKEAAEFIRRYFESFPGVKQYMENIVKEAKQKGYVTTLLHRRRYLPDITSRNRNLRSFAERTAMNTPIQGSAADIIKKAMIDLADRLKREKLQARMLLQVHDELILEAPREEVERLQQIVPEVMENAVQLTVPLKVDYHYGPTWYDAK

SEQ ID NO: 349 - DNA, 1812 bp, synthetic construct
  misc_feature 1..1812: note = Variant of DNA polymerase
  source 1..1812: mol_type = other DNA
atgcatcaccatcaccatcacggtggcagcggtatggttgcaccacagaccaaaaaagaaatggccgtactgccgaacatcaattatacaattgtggaggaagtcaccgaaccgattctcgcggatcgttcggcgttagtggttgaggttctggggtccaactaccataaggctccgatcctgggctttgccctggccaatgaacacggtaacttcttcattcgcactgacacggctctttcttctccgctgtttaccgcgtggctggaggatgagagcaagaagaaatcagtattcgacgctaaacgcgcaatcgtggccctgaaatggaaaggcattgaattacgtggcatcgaatttgacttgttgctggcttcatatctcctgaatccctcgcaaagcacggaagatgtcgcaagcgtggccaagaccaaacagtacatggcagtacagagtgatgaggcagtctatggaaaaggtgcgaaacaaacggtgccagatgaaaacgttttagccgaacatctggtgcgtaaagctgctgcaattcgcgccctggagaaagaactgatccacgatttgcaggaaaatgaacaatacgccctgtttactgaccttgaattacctctgtcctcggtcctggcagagatggaatttaccggtgtgaaagtagatgttgaacgcctgaaagaaatgggcgaggagctcacagaacaactgcgccaagtggagcaggaaatctataagttagctggccaagagttcaacattaacagccctaaacaactgggtgtcattctgtttgaaaaattacagcttcccgtcctgaagaagacgaagaccggctatagtacgagtgctgatgtgctcgagaaacttgcccgtcagcatgaaatcgtcgagaaaattcttcactaccgtcagctcggtaaactgcaatccacatatattgaagggctgctgaaagttgtacatcgcgacacccataaagtccacaccatcttcaaccaggccctgactcaaaccgggcgcctgtcaagcaccgaacctaatctccagaacatcccaattcgtctggaagaaggccgcaaaattcgccaagcatttgtgccatcgaaacctgactgggttatctttagcgcagattactcacagattgagctccgtgttctcgcacacctggcaaacgatgaaaatctgatcgatgcttttcgtcatgaccttgacatccatacgaagacagccatggatattttccatgtaacagcagatgaagttacccccaatatgcgtcgccaagcaaaagccgtgaacttcggtattgtctatgggatctctgattacggtctgagtcagcgtcttaatatcccacgcaaagaagccgccgaatttattcgtcgttatttcgaaagctttcccggcgttaaacagtacatggagaatattgtaaaagaagccaaacagaaaggatacgtcaccacccttttacaccgccgccgctatctgccagacatccattctcgtaatcgcaacttacgttcattcgcagaacgcacggccatgaacaccccaattcaaggatcagccgccgacatcatcaagaaggcaatgattgatttagctgatcgtctgaaaaaagagaaacttcaagctcgtatgctgctccaggttcatgacgaactgattcttgaagctcctcgtgaggaagtcgaacgcctgcagcagattgtacccgaggtcatggagaacgccgtccagttaaccgtcccactgaaagttgattatcactacggtcctacgtggtacgacgctaag

SEQ ID NO: 350 - protein, 604 aa, synthetic construct
  REGION 1..604: note = Variant of DNA polymerase
MHHHHHHGGSGMVAPQTKKEMAVLPNINYTIVEEVTEPILADRSALVVEVLGSNYHKAPILGFALANEHGNFFIRTDTALSSPLFTAWLEDESKKKSVFDAKRAIVALKWKGIELRGIEFDLLLASYLLNPSQSTEDVASVAKTKQYMAVQSDEAVYGKGAKQTVPDENVLAEHLVRKAAAIRALEKELIHDLQENEQYALFTDLELPLSSVLAEMEFTGVKVDVERLKEMGEELTEQLRQVEQEIYKLAGQEFNINSPKQLGVILFEKLQLPVLKKTKTGYSTSADVLEKLARQHEIVEKILHYRQLGKLQSTYIEGLLKVVHRDTHKVHTIFNQALTQTGRLSSTEPNLQNIPIRLEEGRKIRQAFVPSKPDWVIFSADYSQIELRVLAHLANDENLIDAFRHDLDIHTKTAMDIFHVTADEVTPNMRRQAKAVNFGIVYGISDYGLSQRLNIPRKEAAEFIRRYFESFPGVKQYMENIVKEAKQKGYVTTLLHRRRYLPDIHSRNRNLRSFAERTAMNTPIQGSAADIIKKAMIDLADRLKKEKLQARMLLQVHDELILEAPREEVERLQQIVPEVMENAVQLTVPLKVDYHYGPTWYDAK

SEQ ID NO: 351 - DNA, 1812 bp, synthetic construct
  misc_feature 1..1812: note = Variant of DNA polymerase
  source 1..1812: mol_type = other DNA
atgcatcaccatcaccatcacggtggcagcggtatggttgcaccacagaccaaaaaagaagtggccgtactgccgaacatcaattatacaattgtggaggaagtcaccgaaccgattctcgcggatcgttcggcgttagtggttgaggttctggggtccaactaccataaggctccgatcctgggctttgccctggccaatgaacacggtaacttcttcattcgcactgacacggctctttcttctccgctgtttaccgcgtggctggaggatgagagcaagaagaaatcagtattcgacgctaaacgcgcaatcgtggccctgaaatggaaaggcattgaattacgtggcatcgaatttgacttgttgctggcttcatatctcctgaatccctcgcaaagcacggaagatgtcgcaagcgtggccaagaccaaacagtacatggcagtacagagtgattgggcagtctatggaaaaggtgcgaaacaaacggtgccagatgaaaacgttttagccgaacatctggtgcgtaaagctgctgcaattcgcgccctggagaaagaactgatccacgatttgcaggaaaatgaacaatacgccctgtttactgaccttgaattacctctgtcctcggtcctggcagagatggaatttaccggtgtgaaagtagatgttgaacgcctgaaagaaatgggcgaggagctcacagaacaactgcgccaagtggagcaggaaatctataagttagctggccaagagttcaacattaacagccctaaacaactgggtgtcattctgtttgaaaaattacagcttcccgtcctgaagaagacgaagaccggctatagtacgagtgctgatgtgctcgagaaacttgcccgtcagcatgaaatcgtcgagaaaattcttcactaccgtcagctcggtaaactgcaatccacatatattgaagggctgctgaaagttgtacatcgcgacacccataaagtccacaccatcttcaaccaggccctgactcaaaccgggcgcctgtcaagcaccgaacctaatctccagaacatcccaattcgtctggaagaaggccgcaaaattcgccaagcatttgtgccatcgaaacctgactgggttatctttagcgcagattactcacagattgagctccgtgttctcgcacacctggcaaacgatgaaaatctgatcgatgcttttcgtcatgaccttgacatccatacgaagacagccatggatattttccatgtaacagcagatgaagttacccccaatatgcgtcgccaagcaaaagccgtgaacttcggtattgtctatgggatctctgattacggtctgagtcagcgtcttaacatcccgcgcaaagaagccgccgaatttattcgtcgttatttcgaaagctttcccggcgttaaacagtacatggagaatattgtaaaagaagccaaacagaaaggatacgtcaccacccttttacaccgccgccgctatctgccagacatcacctctcgtaatcgtaacttacgttcattcgcagaacgcacggccatgaacaccccaattcaaggatcagccgccgacatcatcaagaaggcaatgattgatttagctgatcgtctgaaaaaagagaaacttcaagctcgtatgctgctccaggttcatgacgaactgattcttgaagctcctcgtgaggaagtcgaacgcctggttcagattgtacccgaggtcatggagaacgccatccagttaaccgtcccactgaaagttgattatcactacggtcctacgtggtacgacgctaag

SEQ ID NO: 352 - protein, 604 aa, synthetic construct
  REGION 1..604: note = Variant of DNA polymerase
MHHHHHHGGSGMVAPQTKKEVAVLPNINYTIVEEVTEPILADRSALVVEVLGSNYHKAPILGFALANEHGNFFIRTDTALSSPLFTAWLEDESKKKSVFDAKRAIVALKWKGIELRGIEFDLLLASYLLNPSQSTEDVASVAKTKQYMAVQSDWAVYGKGAKQTVPDENVLAEHLVRKAAAIRALEKELIHDLQENEQYALFTDLELPLSSVLAEMEFTGVKVDVERLKEMGEELTEQLRQVEQEIYKLAGQEFNINSPKQLGVILFEKLQLPVLKKTKTGYSTSADVLEKLARQHEIVEKILHYRQLGKLQSTYIEGLLKVVHRDTHKVHTIFNQALTQTGRLSSTEPNLQNIPIRLEEGRKIRQAFVPSKPDWVIFSADYSQIELRVLAHLANDENLIDAFRHDLDIHTKTAMDIFHVTADEVTPNMRRQAKAVNFGIVYGISDYGLSQRLNIPRKEAAEFIRRYFESFPGVKQYMENIVKEAKQKGYVTTLLHRRRYLPDITSRNRNLRSFAERTAMNTPIQGSAADIIKKAMIDLADRLKKEKLQARMLLQVHDELILEAPREEVERLVQIVPEVMENAIQLTVPLKVDYHYGPTWYDAK

SEQ ID NO: 353 - DNA, 1812 bp, synthetic construct
  misc_feature 1..1812: note = Variant of DNA polymerase
  source 1..1812: mol_type = other DNA
atgcatcaccatcaccatcacggtggcagcggtatggttgcaccacagaccaaaaaagaagaggccgtactgccgaacatcaattatacaattgtggaggaagtcaccgaaccgattctcgcggatcgttcggcgttagtggttgaggttctggggtccaactaccataaggctccgatcctgggctttgccctggccaatgaacacggtaacttcttcattcgcactgacacggctctttcttctccgctgtttaccgcgtggctggaggatgagagcaagaagaaatcagtattcgacgctaaacgcgcaatcgtggccctgaaatggaaaggcattgaattacgtggcatcgaatttgacttgttgctggcttcatatctcctgaatccctcgcaaagcacggaagatgtcgcaagcgtggccaagaccaaacagtacatggcagtacagagtgatgaggcagtctatggaaaaggtgcgaaacaaacggtgccagatgaaaacgttttagccgaacatctggtgcgtaaagctgctgcaattcgcgccctggagaaagaactgatccacgatttgcaggaaaatgaacaatacgccctgtttactgaccttgaattacctctgtcctcggtcctggcagagatggaatttaccggtgtgaaagtagatgttgaacgcctgaaagaaatgggcgaggagctcacagaacaactgcgccaagtggagcaggaaatctataagttagctggccaagagttcaacattaacagccctaaacaactgggtgtcattctgtttgaaaaattacagcttcccgtcctgaagaagacgaagaccggctatagtacgagtgctgatgtgctcgagaaacttgcccgtcagcatgaaatcgtcgagaaaattcttcactaccgtcagctcggtaaactgcaatccacatatattgaagggctgctgaaagttgtacatcgcgacacccataaagtccacaccatcttcaaccaggccctgactcaaaccgggcgcctgtcaagcaccgaacctaatctccagaacatcccaattcgtctggaagaaggccgcaaaattcgccaagcatttgtgccatcgaaacctgactgggttatctttagcgcagattactcacagattgagctccgtgttctcgcacacctggcaaacgatgaaaatctgatcgatgcttttcgtcatgaccttgacatccatacgaagacagccatggatattttccatgtaacagcagatgaagttacccccaatatgcgtcgccaagcaaaagccgtgaacttcggtattgtctatgggatctctgattacggtctgagtcagcgtcttggcatcccgcgcaaagaagccgccgaatttattcgtcgttatttcgaaagctttcccggcgttaaacagtacatggagaatattgtaaaagaagccaaacagaaaggatacgtcaccacccttttacaccgccgccgctatctgccagacatcacctctcgtaatcgtaacttacgttcattcgcagaacgcacggccatgaacaccccaattcaaggatcagccgccgacatcatcaagaaggcaatgattgatttagctgatcgtctgaaacgcgagaaacttcaagctcgtatgctgctccaggttcatgacgaactgattcttgaagctcctcgtgaggaagtcgaacgcctgcagcagattgtacccgaggtcatggagaacgccgtccagttaaccgtcccactgaaagttgattatcactacggtcctacgtggtacgacgctaag

SEQ ID NO: 354 - protein, 604 aa, synthetic construct
  REGION 1..604: note = Variant of DNA polymerase
MHHHHHHGGSGMVAPQTKKEEAVLPNINYTIVEEVTEPILADRSALVVEVLGSNYHKAPILGFALANEHGNFFIRTDTALSSPLFTAWLEDESKKKSVFDAKRAIVALKWKGIELRGIEFDLLLASYLLNPSQSTEDVASVAKTKQYMAVQSDEAVYGKGAKQTVPDENVLAEHLVRKAAAIRALEKELIHDLQENEQYALFTDLELPLSSVLAEMEFTGVKVDVERLKEMGEELTEQLRQVEQEIYKLAGQEFNINSPKQLGVILFEKLQLPVLKKTKTGYSTSADVLEKLARQHEIVEKILHYRQLGKLQSTYIEGLLKVVHRDTHKVHTIFNQALTQTGRLSSTEPNLQNIPIRLEEGRKIRQAFVPSKPDWVIFSADYSQIELRVLAHLANDENLIDAFRHDLDIHTKTAMDIFHVTADEVTPNMRRQAKAVNFGIVYGISDYGLSQRLGIPRKEAAEFIRRYFESFPGVKQYMENIVKEAKQKGYVTTLLHRRRYLPDITSRNRNLRSFAERTAMNTPIQGSAADIIKKAMIDLADRLKREKLQARMLLQVHDELILEAPREEVERLQQIVPEVMENAVQLTVPLKVDYHYGPTWYDAK

SEQ ID NO: 355 - DNA, 1812 bp, synthetic construct
  misc_feature 1..1812: note = Variant of DNA polymerase
  source 1..1812: mol_type = other DNA
atgcatcaccatcaccatcacggtggcagcggtatggttgcaccacagaccaaaaaagaagaagccgtactgccgaacatcaattatacaattgtggaggaagtcaccgaaccgattctcgcggatcgttcggcgttagtggttgaggttctggggtccaactaccataaggctccgatcctgggctttgccctggccaatgaacacggtaacttcttcattcgcactgacacggctctttcttctccgctgtttaccgcgtggctggaggatgagagcaagaagaaatcagtattcgacgctaaacgcgcaatcgtggccctgaaatggaaaggcattgaattacgtggcatcgaatttgacttgttgctggcttcatatctcctgaatccctcgcaaagcacggaagatgtcgcaagcgtggccaagaccaaacagtacatggcagtacagagtgattgggcagtctatggaaaaggtgcgaaacaaacggtgccagatgaaaacgttttagccgaacatctggtgcgtaaagctgctgcaattcgcgccctggagaaagaactgatccacgatttgcaggaaaatgaacaatacgccctgtttactgaccttgaattacctctgtcctcggtcctggcagagatggaatttaccggtgtgaaagtagatgttgaacgcctgaaagaaatgggcgaggagctcacagaacaactgcgccaagtggagcaggaaatctataagttagctggccaacgcttcaacattaacagccctaaacaactgggtgtcattctgtttgaaaaattacagcttcccgtcctgaagaagacgaagaccggctatagtacgagtgctgatgtgctcgagaaacttgcccgtcagcatgaaatcgtcgagaaaattcttcactaccgtcagctcggtaaactgcaatccacatatattgaagggctgctgaaagttgtacatcgcgacacccataaagtccacaccatcttcaaccaggccctgactcaaaccgggcgcctgtcaagcaccgaacctaatctccagaacatcccaattcgtctggaagaaggccgcaaaattcgccaagcatttgtgccatcgaaacctgactgggttatctttagcgcagattactcacagattgagctccgtgttctcgcacacctggcaaacgatgaaaatctgatcgatgcttttcgtcatgaccttgacatccatacgaagacagccatggatattttccatgtaacagcagatgaagttacccccaatatgcgtcgccaagcaaaagccgtgaacttcggtattgtctatgggatctctgattacggtctgagtcagcgtcttaatatcccgcgcaaagaagccgccgaatttattcgtcgttatttcgaaagctttcccggcgttaaacagtacatggagaatattgtaaaagaagccaaacagaaaggatacgtcaccacccttttacaccgccgccgctatctgccagacatccattctcgtaatcgcaacttacgttcattcgcagaacgcacggccatgaacaccccaattcaaggatcagccgccgacatcatcaagaaggcaatgattgatttagctgatcgtctgaaacgcgagaaacttcaagctcgtatgctgctccaggttcatgacgaactgattcttgaagctcctcgtgaggaagtcgaacgcctgcagcagattgtacccgaggtcatggagaacgccatccagttaaccgtcccactgaaagttgattatcactacggtcctacgtggtacgacgctaag

SEQ ID NO: 356 - protein, 604 aa, synthetic construct
  REGION 1..604: note = Variant of DNA polymerase
MHHHHHHGGSGMVAPQTKKEEAVLPNINYTIVEEVTEPILADRSALVVEVLGSNYHKAPILGFALANEHGNFFIRTDTALSSPLFTAWLEDESKKKSVFDAKRAIVALKWKGIELRGIEFDLLLASYLLNPSQSTEDVASVAKTKQYMAVQSDWAVYGKGAKQTVPDENVLAEHLVRKAAAIRALEKELIHDLQENEQYALFTDLELPLSSVLAEMEFTGVKVDVERLKEMGEELTEQLRQVEQEIYKLAGQRFNINSPKQLGVILFEKLQLPVLKKTKTGYSTSADVLEKLARQHEIVEKILHYRQLGKLQSTYIEGLLKVVHRDTHKVHTIFNQALTQTGRLSSTEPNLQNIPIRLEEGRKIRQAFVPSKPDWVIFSADYSQIELRVLAHLANDENLIDAFRHDLDIHTKTAMDIFHVTADEVTPNMRRQAKAVNFGIVYGISDYGLSQRLNIPRKEAAEFIRRYFESFPGVKQYMENIVKEAKQKGYVTTLLHRRRYLPDIHSRNRNLRSFAERTAMNTPIQGSAADIIKKAMIDLADRLKREKLQARMLLQVHDELILEAPREEVERLQQIVPEVMENAIQLTVPLKVDYHYGPTWYDAK

SEQ ID NO: 357 - DNA, 1812 bp, synthetic construct
  misc_feature 1..1812: note = Variant of DNA polymerase
  source 1..1812: mol_type = other DNA
atgcatcaccatcaccatcacggtggcagcggtatggttgcaccacagaccaaaaaagaagaggccgtactgccgaacatcaattatacaattgtggaggaagtcaccgaaccgattctcgcggatcgttcggcgttagtggttgaggttctggggtccaactaccataaggctccgatcctgggctttgccctggccaatgaacacggtaacttcttcattcgcactgacacggctctttcttctccgctgtttaccgcgtggctggaggatgagagcaagaagaaatcagtattcgacgctaaacgcgcaatcgtggccctgaaatggaaaggcattgaattacgtggcatcgaatttgacttgttgctggcttcatatctcctgaatccctcgcaaagcacggaagatgtcgcaagcgtggccaagaccaaacagtacatggcagtacagagcgatgaagcagtctatggaaaaggtgcgaaacaaacggtgccagatgaaaacgttttagccgaacatctggtgcgtaaagctgctgcaattcgcgccctggagaaagaactgatccacgatttgcaggaaaatgaacaatacgccctgtttactgaccttgaattacctctgtcctcggtcctggcagagatggaatttaccggtgtgaaagtagatgttgaacgcctgaaagaaatgggcgaggagctcacagaacaactgcgccaagtggagcaggaaatctataagttagctggccaagagttcaacattaacagccctaaacaactgggtgtcattctgtttgaaaaattacagcttcccgtcctgaagaagacgaagaccggctatagtacgagtgctgatgtgctcgagaaacttgcccgtcagcatgaaatcgtcgagaaaattcttcactaccgtcagctcggtaaactgcaatccacatatattgaagggctgctgaaagttgtacatcgcgacacccataaagtccacaccatcttcaaccaggccctgactcaaaccgggcgcctgtcaagcaccgaacctaatctccagaacatcccaattcgtctggaagaaggccgcaaaattcgccaagcatttgtgccatcgaaacctgactgggttatctttagcgcagattactcacagattgagctccgtgttctcgcacacctggcaaacgatgaaaatctgatcgatgcttttcgtcatgaccttgacatccatacgaagacagccatggatattttccatgtaacagcagatgaagttacccccaatatgcgtcgccaagcaaaagccgtgaacttcggtattgtctatgggatctctgattacggtctgagtcagcgtcttaacatcccgcgcaaagaagccgccgaatttattcgtcgttatttcgaaagctttcccggcgttaaacagtacatggagaatattgtaaaagaagccaaacagaaaggatacgtcaccacccttttacaccgccgccgctatctgccagacatccattctcgtaatcgcaacttacgttcattcgcagaacgcacggccatgaacaccccaattcaaggatcagccgccgacatcatcaagaaggcaatgattgatttagctgatcgtctgaaacgcgagaaacttcaagctcgtatgctgctccaggttcatgacgaactgattcttgaagctcctcgtgaggaagtcgaacgcctgcagcagattgtacccgaggtcatggagaacgccatccagttaaccgtcccactgaaagttgattatcactacggtcctacgtggtacgacgctaag

SEQ ID NO: 358 - protein, 604 aa, synthetic construct
  REGION 1..604: note = Variant of DNA polymerase
MHHHHHHGGSGMVAPQTKKEEAVLPNINYTIVEEVTEPILADRSALVVEVLGSNYHKAPILGFALANEHGNFFIRTDTALSSPLFTAWLEDESKKKSVFDAKRAIVALKWKGIELRGIEFDLLLASYLLNPSQSTEDVASVAKTKQYMAVQSDEAVYGKGAKQTVPDENVLAEHLVRKAAAIRALEKELIHDLQENEQYALFTDLELPLSSVLAEMEFTGVKVDVERLKEMGEELTEQLRQVEQEIYKLAGQEFNINSPKQLGVILFEKLQLPVLKKTKTGYSTSADVLEKLARQHEIVEKILHYRQLGKLQSTYIEGLLKVVHRDTHKVHTIFNQALTQTGRLSSTEPNLQNIPIRLEEGRKIRQAFVPSKPDWVIFSADYSQIELRVLAHLANDENLIDAFRHDLDIHTKTAMDIFHVTADEVTPNMRRQAKAVNFGIVYGISDYGLSQRLNIPRKEAAEFIRRYFESFPGVKQYMENIVKEAKQKGYVTTLLHRRRYLPDIHSRNRNLRSFAERTAMNTPIQGSAADIIKKAMIDLADRLKREKLQARMLLQVHDELILEAPREEVERLQQIVPEVMENAIQLTVPLKVDYHYGPTWYDAK

SEQ ID NO: 359 - DNA, 1812 bp, synthetic construct
  misc_feature 1..1812: note = Variant of DNA polymerase
  source 1..1812: mol_type = other DNA
atgcatcaccatcaccatcacggtggcagcggtatggttgcaccacagaccaaaaaagaagaggccgtactgccgaacatcaattatacaattgtggaggaagtcaccgaaccgattctcgcggatcgttcggcgttagtggttgaggttctggggtccaactaccataaggctccgatcctgggctttgccctggccaatgaacacggtaacttcttcattcgcactgacacggctctttcttctccgctgtttaccgcgtggctggaggatgagagcaagaagaaatcagtattcgacgctaaacgcgcaatcgtggccctgaaatggaaaggcattgaattacgtggcatcgaatttgacttgttgctggcttcatatctcctgaatccctcgcaaagcacggaagatgtcgcaagcgtggccaagcgcaaacagtacatggcagtacagagtgattgggcagtctatggaaaaggtgcgaaacaaacggtgccagatgaaaacgttttagccgaacatctggtgcgtaaagctgctgcaattcgcgccctggagaaagaactgatccacgatttgcaggaaaatgaacaatacgccctgtttactgaccttgaattacctctgtcctcggtcctggcagagatggaatttaccggtgtgaaagtagatgttgaacgcctgaaagaaatgggcgaggagctcacagaacaactgcgccaagtggagcaggaaatctataagttagctggccaacgcttcaacattaacagccctaaacaactgggtgtcattctgtttgaaaaattacagcttcccgtcctgaagaagacgaagaccggctatagtacgagtgctgatgtgctcgagaaacttgcccgtcagcatgaaatcgtccgcaaaattcttcactaccgtcagctcggtaaactgcaatccacatatattgaagggctgctgaaagttgtacatcgcgacacccataaagtccacaccatcttcaaccaggccctgactcaaaccgggcgcctgtcaagcaccgaacctaatctccagaacatcccaattcgtctggaagaaggccgcaaaattcgccaagcatttgtgccatcgaaacctgactgggttatctttagcgcagattactcacagattgagctccgtgttctcgcacacctggcaaacgatgaaaatctgatcgatgcttttcgtcatgaccttgacatccatacgaagacagccatggatattttccatgtaacagcagatgaagttacccccaatatgcgtcgccaagcaaaagccgtgaacttcggtattgtctatgggatctctgattacggtctgagtcagcgtcttggcatcacgcgcaaagaagccgccgaatttattcgtcgttatttcgaaagctttcccggcgttaaacagtacatggagaatattgtaaaagaagccaaacagaaaggatacgtcaccacccttttacaccgccgccgctatctgccagacatccattctcgtaatcgcaacttacgttcattcgcagaacgcacggccatgaacaccccaattcaaggatcagccgccgacatcatcaagaaggcaatgattgatttagctgatcgtctgaaacgcgagcaccttcaagctcgtatgctgctccaggttcatgacgaactgattcttgaagctcctcgtgaggaagtcgaacgcctggttcagattgtacccgaggtcatggagaacgccatccagttaaccgtcccactgaaagttgattatcactacggtcctacgtggtacgacgctaag

SEQ ID NO: 360 - protein, 604 aa, synthetic construct
  REGION 1..604: note = Variant of DNA polymerase
MHHHHHHGGSGMVAPQTKKEEAVLPNINYTIVEEVTEPILADRSALVVEVLGSNYHKAPILGFALANEHGNFFIRTDTALSSPLFTAWLEDESKKKSVFDAKRAIVALKWKGIELRGIEFDLLLASYLLNPSQSTEDVASVAKRKQYMAVQSDWAVYGKGAKQTVPDENVLAEHLVRKAAAIRALEKELIHDLQENEQYALFTDLELPLSSVLAEMEFTGVKVDVERLKEMGEELTEQLRQVEQEIYKLAGQRFNINSPKQLGVILFEKLQLPVLKKTKTGYSTSADVLEKLARQHEIVRKILHYRQLGKLQSTYIEGLLKVVHRDTHKVHTIFNQALTQTGRLSSTEPNLQNIPIRLEEGRKIRQAFVPSKPDWVIFSADYSQIELRVLAHLANDENLIDAFRHDLDIHTKTAMDIFHVTADEVTPNMRRQAKAVNFGIVYGISDYGLSQRLGITRKEAAEFIRRYFESFPGVKQYMENIVKEAKQKGYVTTLLHRRRYLPDIHSRNRNLRSFAERTAMNTPIQGSAADIIKKAMIDLADRLKREHLQARMLLQVHDELILEAPREEVERLVQIVPEVMENAIQLTVPLKVDYHYGPTWYDAK

SEQ ID NO: 361 - DNA, 1812 bp, synthetic construct
  misc_feature 1..1812: note = Variant of DNA polymerase
  source 1..1812: mol_type = other DNA
atgcatcaccatcaccatcacggtggcagcggtatggttgcaccacagaccaaaaaagaagaggccgtactgccgaacatcaattatacaattgtggaggaagtcaccgaaccgattctcgcggatcgttcggcgttagtggttgaggttctggggtccaactaccataaggctccgatcctgggctttgccctggccaatgaacacggtaacttcttcattcgcactgacacggctctttcttctccgctgtttaccgcgtggctggaggatgagagcaagaagaaatcagtattcgacgctaaacgcgcaatcgtggccctgaaatggaaaggcattgaattacgtggcatcgaatttgacttgttgctggcttcatatctcctgaatccctcgcaaagcacggaagatgtcgcaagcgtggccaagaccaaacagtacatggcagtacagagtgattgggcagtctatggaaaaggtgcgaaacaaacggtgccagatgaaaacgttttagccgaacatctggtgcgtaaagctgctgcaattcgcgccctggagaaagaactgatcgaagatttgcaggaaaatgaacaatacgccctgtttactgaccttgaattacctctgtcctcggtcctggcagagatggaatttaccggtgtgaaagtagatgttgaacgcctgaaagaaatgggcgaggagctcacagaacaactgcgccaagtggagcaggaaatctataagttagctggccaacgcttcaacattaacagccctaaacaactgggtgtcattctgtttgaaaaattacagcttcccgtcctgaagaagacgaagaccggctatagtacgagtgctgatgtgctcgagaaacttgcccgtcagcatgaaatcgtccgcaaaattcttcactaccgtcagctcggtaaactgcaatccacatatattgaagggctgctgaaagtagtacattgggacacccataaagtccacaccatcttcaaccaggccctgactcaaaccgggcgcctgtcaagcaccgaacctaatctccagaacatcccaattcgtctggaagaaggccgcaaaattcgccaagcatttgtgccatcgaaacctgactgggttatctttagcgcagattactcacagattgagctccgtgttctcgcacacctggcaaacgatgaaaatctgatcgatgcttttcgtcatgaccttgacatccatacgaagacagccatggatattttccatgtaacagcagatgaagttacccccaatatgcgtcgccaagcaaaagccgtgaacttcggtattgtctatgggatctctgattacggtctgagtcagcgtcttggcatcacgcgcaaagaagccgccgaatttattcgtcgttatttcgaaagctttcccggcgttaaacagtacatggagaatattgtaaaagaagccaaacagaaaggatacgtcaccacccttttacaccgccgccgctatctgccagacatccattctcgtaatcgcaacttacgttcattcgcagaacgcacggccatgaacaccccaattcaaggatcagccgccgacatcatcaagaaggcaatgattgatttagctgatcgtctgaaacgcgagaaacttcaagctcgtatgctgctccaggttcatgacgaactgattcttgaagctcctcgtgaggaagtcgaacgcctggttcagattgtacccgaggtcatggagaacgccatccagttaaccgtcccactgaaagttgattatcactacggtcctacgtggtacgacgctaag

SEQ ID NO: 362 - protein, 604 aa, synthetic construct
  REGION 1..604: note = Variant of DNA polymerase
MHHHHHHGGSGMVAPQTKKEEAVLPNINYTIVEEVTEPILADRSALVVEVLGSNYHKAPILGFALANEHGNFFIRTDTALSSPLFTAWLEDESKKKSVFDAKRAIVALKWKGIELRGIEFDLLLASYLLNPSQSTEDVASVAKTKQYMAVQSDWAVYGKGAKQTVPDENVLAEHLVRKAAAIRALEKELIEDLQENEQYALFTDLELPLSSVLAEMEFTGVKVDVERLKEMGEELTEQLRQVEQEIYKLAGQRFNINSPKQLGVILFEKLQLPVLKKTKTGYSTSADVLEKLARQHEIVRKILHYRQLGKLQSTYIEGLLKVVHWDTHKVHTIFNQALTQTGRLSSTEPNLQNIPIRLEEGRKIRQAFVPSKPDWVIFSADYSQIELRVLAHLANDENLIDAFRHDLDIHTKTAMDIFHVTADEVTPNMRRQAKAVNFGIVYGISDYGLSQRLGITRKEAAEFIRRYFESFPGVKQYMENIVKEAKQKGYVTTLLHRRRYLPDIHSRNRNLRSFAERTAMNTPIQGSAADIIKKAMIDLADRLKREKLQARMLLQVHDELILEAPREEVERLVQIVPEVMENAIQLTVPLKVDYHYGPTWYDAK

SEQ ID NO: 363 - DNA, 1812 bp, synthetic construct
  misc_feature 1..1812: note = Variant of DNA polymerase
  source 1..1812: mol_type = other DNA
atgcatcaccatcaccatcacggtggcagcggtatggttgcaccacagaccaaaaaagaagaggccgtactgccgaacatcaattatacaattgtggaggaagtcaccgaaccgattctcgcggatcgttcggcgttagtggttgaggttctggggtccaactaccataaggctccgatcctgggctttgccctggccaatgaacacggtaacttcttcattcgcactgacacggctctttcttctccgctgtttaccgcgtggctggaggatgagagcaagaagaaatcagtattcgacgctaaacgcgcaatcgtggccctgaaatggaaaggcattgaattacgtggcatcgaatttgacttgttgctggcttcatatctcctgaatccctcgcaaagcacggaagatgtcgcaagcgtggccaagcgcaaacagtacatggcagtacagagtgattgggcagtctatggaaaaggtgcgaaacaaacggtgccagatgaaaacgttttagccgaacatctggtgcgtaaagctgctgcaattcgcgccctggagaaagaactgatccacgatttgcaggaaaatgaacaatacgccctgtttactgaccttgaattacctctgtcctcggtcctggcagagatggaatttaccggtgtgaaagtagatgttgaacgcctgaaagaaatgggcgaggagctcacagaacaactgcgccaagtggagcaggaaatctataagttagctggccaacgcttcaacattaacagccctaaacaactgggtgtcattctgtttgaaaaattacagcttcccgtcctgaagaagacgaagaccggctatagtacgagtgctgatgtgctcgagaaacttgcccgtcagcatgaaatcgtccgcaaaattcttcactaccgtcagctcggtaaactgcaatccacatatattgaagggctgctgaaagttgtacatcgcgacacccataaagtccacaccatcttcaaccaggccctgactcaaaccgggcgcctgtcaagcaccgaacctaatctccagaacatcccaattcgtctggaagaaggccgcaaaattcgccaagcatttgtgccatcgaaagctgagtgggttatctttagcgcagattactcacagattgagctccgtgttctcgcacacctggcaaacgatgaaaatctgatcgatgcttttcgtcatgaccttgacatccatacgaagacagccatggatattttccatgtaacagcagatgaagttacccccaatatgcgtcgccaagcaaaagccgtgaacttcggtattgtctatgggatctctgattacggtctgagtcagcgtcttggcatcacgcgcaaagaagccgccgaatttattcgtcgttatttcgaaagctttcccggcgttaaacagtacatggagaatattgtaaaagaagccaaacagaaaggatacgtcaccacccttttacaccgccgccgctatctgccagacatccattctcgtaatcgcaacttacgttcattcgcagaacgcacggccatgaacaccccaattcaaggatcagccgccgacatcatcaagaaggcaatgattgatttagctgatcgtctgaaacgcgagaaacttcaagctcgtatgctgctccaggttcatgacgaactgattcttgaagctcctcgtgaggaagtcgaacgcctggttcagattgtacccgaggtcatggagaacgccatccagttaaccgtcccactgaaagttgattatcactacggtcctacgtggtacgacgctaag

SEQ ID NO: 364 - protein, 604 aa, synthetic construct
  REGION 1..604: note = Variant of DNA polymerase
MHHHHHHGGSGMVAPQTKKEEAVLPNINYTIVEEVTEPILADRSALVVEVLGSNYHKAPILGFALANEHGNFFIRTDTALSSPLFTAWLEDESKKKSVFDAKRAIVALKWKGIELRGIEFDLLLASYLLNPSQSTEDVASVAKRKQYMAVQSDWAVYGKGAKQTVPDENVLAEHLVRKAAAIRALEKELIHDLQENEQYALFTDLELPLSSVLAEMEFTGVKVDVERLKEMGEELTEQLRQVEQEIYKLAGQRFNINSPKQLGVILFEKLQLPVLKKTKTGYSTSADVLEKLARQHEIVRKILHYRQLGKLQSTYIEGLLKVVHRDTHKVHTIFNQALTQTGRLSSTEPNLQNIPIRLEEGRKIRQAFVPSKAEWVIFSADYSQIELRVLAHLANDENLIDAFRHDLDIHTKTAMDIFHVTADEVTPNMRRQAKAVNFGIVYGISDYGLSQRLGITRKEAAEFIRRYFESFPGVKQYMENIVKEAKQKGYVTTLLHRRRYLPDIHSRNRNLRSFAERTAMNTPIQGSAADIIKKAMIDLADRLKREKLQARMLLQVHDELILEAPREEVERLVQIVPEVMENAIQLTVPLKVDYHYGPTWYDAK

SEQ ID NO: 365 - DNA, 1812 bp, synthetic construct
  misc_feature 1..1812: note = Variant of DNA polymerase
  source 1..1812: mol_type = other DNA
atgcatcaccatcaccatcacggtggcagcggtatggttgcaccacagaccaaaaaagaagaggccgtactgccgaacatcaattatacaattgtggaggaagtcaccgaaccgattctcgcggatcgttcggcgttagtggttgaggttctggggtccaactaccataaggctccgatcctgggctttgccctggccaatgagcacggtaacttcttcattcgcactgacacggctctttcttctccgctgtttaccgcgtggctggaggatgagagcaagaagaaatcagtattcgacgctaaacgcgcaatcgtggccctgaaatggaaaggcattgaattacgtggcatcgaatttgacttgttgctggcttcatatctcctgaatccctcgcagcgtacgccggatgtcgcaagcgtggccaagaccaaacagtacatggcagtacagagtgattgggcagtctatggaaaaggtgcgaaacaaacggtgccagatgaaaacgttttagccgaacatctggtgcgtaaagctgctgcaattcgcgccctggagaaagaactgatccacgatttgcaggaaaatgaacaatacgccctgtttactgaccttgaattacctctgtcctcggtcctggcagagatggaatttaccggtgtgaaagtagatgttgaacgcctgaaagaaatgggcgaggagctcacagaacaactgcgccaagtggagcaggaaatctataagttagctggccaacgcttcaacattaacagccctaaacaactgggtgtcattctgtttgaaaaattacagcttcccgtcctgaagaagacgaagaccggctatagtacgagtgctgatgtgctcgagaaacttgcccgtcagcatgaaatcgtccgcaaaattcttcactaccgtcagctcggtaaactgcaatccacatatattgaagggctgctgaaagttgtacatcgcgacacccataaagtccacaccatcttcaaccaggccctgactcaaaccgggcgcctgtcaagcaccgaacctaatctccagaacatcccaattcgtctggaagaaggccgcaaaattcgccaagcatttgtgccatcgaaacctgactgggttatctttagcgcagattactcacagattgagctccgtgttctcgcacacctggcaaacgatgaaaatctgatcgatgcttttcgtcatgaccttgacatccatacgaagacagccatggatattttccatgtaacagcagatgaagttacccccaatatgcgtcgccaagcaaaagccgtgaacttcggtattgtctatgggatctctgattacggtctgagtcagcgtcttggcatcacgcgcaaagaagccgccgaatttattcgtcgttatttcgaaagctttcccggcgttaaacagtacatggagaatattgtaaaagaagccaaacagaaaggatacgtcaccacccttttacaccgccgccgctatctgccagacatccattctcgtaatcgcaacttacgttcattcgcagaacgcacggccatgaacaccccaattcaaggatcagccgccgacatcatcaagaaggcaatgattgatttagctgatcgtctgaaacgcgagcaccttcaagctcgtatgctgctccaggttcatgacgaactgattcttgaagctcctcgtgaggaagtcgaacgcctggttcagattgtacccgaggtcatggagaacgccatccagttaaccgtcccactgaaagttgattatcactacggtcctacgtggtacgacgctaag

SEQ ID NO: 366 - protein, 604 aa, synthetic construct
  REGION 1..604: note = Variant of DNA polymerase
MHHHHHHGGSGMVAPQTKKEEAVLPNINYTIVEEVTEPILADRSALVVEVLGSNYHKAPILGFALANEHGNFFIRTDTALSSPLFTAWLEDESKKKSVFDAKRAIVALKWKGIELRGIEFDLLLASYLLNPSQRTPDVASVAKTKQYMAVQSDWAVYGKGAKQTVPDENVLAEHLVRKAAAIRALEKELIHDLQENEQYALFTDLELPLSSVLAEMEFTGVKVDVERLKEMGEELTEQLRQVEQEIYKLAGQRFNINSPKQLGVILFEKLQLPVLKKTKTGYSTSADVLEKLARQHEIVRKILHYRQLGKLQSTYIEGLLKVVHRDTHKVHTIFNQALTQTGRLSSTEPNLQNIPIRLEEGRKIRQAFVPSKPDWVIFSADYSQIELRVLAHLANDENLIDAFRHDLDIHTKTAMDIFHVTADEVTPNMRRQAKAVNFGIVYGISDYGLSQRLGITRKEAAEFIRRYFESFPGVKQYMENIVKEAKQKGYVTTLLHRRRYLPDIHSRNRNLRSFAERTAMNTPIQGSAADIIKKAMIDLADRLKREHLQARMLLQVHDELILEAPREEVERLVQIVPEVMENAIQLTVPLKVDYHYGPTWYDAK

SEQ ID NO: 367 - DNA, 1812 bp, synthetic construct
  misc_feature 1..1812: note = Variant of DNA polymerase
  source 1..1812: mol_type = other DNA
atgcatcaccatcaccatcacggtggcagcggtatggttgcaccacagaccaaaaaagaagaggccgtactgccgaacatcaattatacaattgtggaggaagtcaccgaaccgattctcgcggatcgttcggcgttagtggttgaggttctggggtccaactaccataaggctccgatcctgggctttgccctggccaatgagcacggtaacttcttcattcgcactgacacggctcttcgctctccgctgtttaccgcgtggctggaggatgagagcaagaagaaatcagtattcgacgctaaacgcgcaatcgtggccctgaaatggaaaggcattgaattacgtggcatcgaatttgacttgttgctggcttcatatctcctgaatccctcgcaaagcacggaggatgtcgcaagcgtggccaagcgcaaacagtacatggcagtacagagtgattgggcagtctatggaaaaggtgcgaaacaaacggtgccagatgaaaacgttttagccgaacatctggtgcgtaaagctgctgcaattcgcgccctggagaaagaactgatccacgatttgcaggaaaatgaacaatacgccctgtttactgaccttgaattacctctgtcctcggtcctggcagagatggaatttaccggtgtgaaagtagatgttgaacgcctgaaagaaatgggcgaggagctcacagaacaactgcgccaagtggagcaggaaatctataagttagctggccaacgcttcaacattaacagccctaaacaactgggtgtcattctgtttgaaaaattacagcttcccgtcctgaagaagacgaagaccggctatagtacgagtgctgatgtgctcgagaaacttgcccgtcagcatgaaatcgtccgcaaaattcttcactaccgtcagctcggtaaactgcaatccacatatattgaagggctgctgaaagttgtacatcgcgacacccataaagtccacaccatcttcaaccaggccctgactcaaaccgggcgcctgtcaagcaccgaacctaatctccagaacatcccaattcgtctggaagaaggccgcaaaattcgccaagcatttgtgccatcgaaacctgactgggttatctttagcgcagattactcacagattgagctccgtgttctcgcacacctggcaaacgatgaaaatctgatcgatgcttttcgtcatgaccttgacatccatacgaagacagccatggatattttccatgtaacagcagatgaagttacccccaatatgcgtcgccaagcaaaagccgtgaacttcggtattgtctatgggatctctgattacggtctgagtcagcgtcttggcatcacgcgcaaagaagccgccgaatttattcgtcgttatttcgaaagctttcccggcgttaaacagtacatggagaatattgtaaaagaagccaaacagaaaggatacgtcaccacccttttacaccgccgccgctatctgccagacatccattctcgtaatcgcaacttacgttcattcgcagaacgcacggccatgaacaccccaattcaaggatcagccgccgacatcatcaagaaggcaatgattgatttagctgatcgtctgaaacgcgagcaccttcaagctcgtatgctgctccaggttcatgacgaactgattcttgaagctcctcgtgaggaagtcgaacgcctggttcagattgtacccgaggtcatggagaacgccatccagttaaccgtcccactgaaagttgattatcactacggtcctacgtggtacgacgctaag

SEQ ID NO: 368 - protein, 604 aa, synthetic construct
  REGION 1..604: note = Variant of DNA polymerase
MHHHHHHGGSGMVAPQTKKEEAVLPNINYTIVEEVTEPILADRSALVVEVLGSNYHKAPILGFALANEHGNFFIRTDTALRSPLFTAWLEDESKKKSVFDAKRAIVALKWKGIELRGIEFDLLLASYLLNPSQSTEDVASVAKRKQYMAVQSDWAVYGKGAKQTVPDENVLAEHLVRKAAAIRALEKELIHDLQENEQYALFTDLELPLSSVLAEMEFTGVKVDVERLKEMGEELTEQLRQVEQEIYKLAGQRFNINSPKQLGVILFEKLQLPVLKKTKTGYSTSADVLEKLARQHEIVRKILHYRQLGKLQSTYIEGLLKVVHRDTHKVHTIFNQALTQTGRLSSTEPNLQNIPIRLEEGRKIRQAFVPSKPDWVIFSADYSQIELRVLAHLANDENLIDAFRHDLDIHTKTAMDIFHVTADEVTPNMRRQAKAVNFGIVYGISDYGLSQRLGITRKEAAEFIRRYFESFPGVKQYMENIVKEAKQKGYVTTLLHRRRYLPDIHSRNRNLRSFAERTAMNTPIQGSAADIIKKAMIDLADRLKREHLQARMLLQVHDELILEAPREEVERLVQIVPEVMENAIQLTVPLKVDYHYGPTWYDAK

SEQ ID NO: 369 - DNA, 1812 bp, synthetic construct
  misc_feature 1..1812: note = Variant of DNA polymerase
  source 1..1812: mol_type = other DNA
atgcatcaccatcaccatcacggtggcagcggtatggttgcaccacagaccaaaaaagaagaggccgtactgccgaacatcaattatacaattgtggaggaagtcaccgaaccgattctcgcggatcgttcggcgttagtggttgaggttctggggtccaactaccataaggctccgatcctgggctttgccctggccaatgaacacggtaacttcttcattcgcactgacacggctctttcttctccgctgtttaccgcgtggctggaggatgagagcaagaagaaatcagtattcgacgctaaacgcgcaatcgtggccctgaaatggaaaggcattgaattacgtggcatcgaatttgacttgttgctggcttcatatctcctgaatccctcgcaaagcacggaagatgtcgcaagcgtggccaagcgcaaacagtacatggcagtacagagtgattgggcagtctatggaaaaggtgcgaaacaaacggtgccagatgaaaacgttttagccgaacatctggtgcgtaaagctgctgcaattcgcgccctggagaaagaactgatccgcgatttgcaggaaaatgaacaatacgccctgtttactgaccttgaattacctctgtcctcggtcctggcagagatggaatttaccggtgtgaaagtagatgttgagcgcctgaaagggatgggcgaggagctcacagaacaactgcgccaagtggagcaggaaatctataagttagctggccaacgcttcaacattaacagccctaaacaactgggtgtcattctgtttgaaaaattacagcttcccgtcctgaagaagacgaagaccggctatagtacgagtgctgatgtgctcgagaaacttgcccgtcagcatgaaatcgtccgcaaaattcttcactaccgtcagctcggtaaactgcaatccacatatattgaagggctgctgaaatgtgtacatcgtgacacccataaagtccacaccatcttcaaccaggccctgactcaaaccgggcgcctgtcaagcaccgaacctaatctccagaacatcccaattcgtctggaagaaggccgcaaaattcgccaagcatttgtgccatcgaaacctgactgggttatctttagcgcagattactcacagattgagctccgtgttctcgcacacctggcaaacgatgaaaatctgatcgatgcttttcgtcatgaccttgacatccatacgaagacagccatggatattttccatgtaacagcagatgaagttacccccaatatgcgtcgccaagcaaaagccgtgaacttcggtattgtctatgggatctctgattacggtctgagtcagcgtcttggcatcacgcgcaaagaagccgccgaatttattcgtcgttatttcgaaagctttcccggcgttaaacagtacatggagaatattgtaaaagaagccaaacagaaaggatacgtcaccacccttttacaccgccgccgctatctgccagacatccattctcgtaatcgcaacttacgttcattcgcagaacgcacggccatgaacaccccaattcaaggatcagccgccgacatcatcaagaaggcaatgattgatttagctgatcgtctgaaacgcgagaaacttcaagctcgtatgctgctccaggttcatgacgaactgattcttgaagctcctcgtgaggaagtcgaacgcctggttcagattgtacccgaggtcatggagaacgccatccagttaaccgtcccactgaaagttgattatcactacggtcctacgtggtacgacgctaag

SEQ ID NO: 370 - protein, 604 aa, synthetic construct
  REGION 1..604: note = Variant of DNA polymerase
MHHHHHHGGSGMVAPQTKKEEAVLPNINYTIVEEVTEPILADRSALVVEVLGSNYHKAPILGFALANEHGNFFIRTDTALSSPLFTAWLEDESKKKSVFDAKRAIVALKWKGIELRGIEFDLLLASYLLNPSQSTEDVASVAKRKQYMAVQSDWAVYGKGAKQTVPDENVLAEHLVRKAAAIRALEKELIRDLQENEQYALFTDLELPLSSVLAEMEFTGVKVDVERLKGMGEELTEQLRQVEQEIYKLAGQRFNINSPKQLGVILFEKLQLPVLKKTKTGYSTSADVLEKLARQHEIVRKILHYRQLGKLQSTYIEGLLKCVHRDTHKVHTIFNQALTQTGRLSSTEPNLQNIPIRLEEGRKIRQAFVPSKPDWVIFSADYSQIELRVLAHLANDENLIDAFRHDLDIHTKTAMDIFHVTADEVTPNMRRQAKAVNFGIVYGISDYGLSQRLGITRKEAAEFIRRYFESFPGVKQYMENIVKEAKQKGYVTTLLHRRRYLPDIHSRNRNLRSFAERTAMNTPIQGSAADIIKKAMIDLADRLKREKLQARMLLQVHDELILEAPREEVERLVQIVPEVMENAIQLTVPLKVDYHYGPTWYDAK

SEQ ID NO: 371 - DNA, 1812 bp, synthetic construct
  misc_feature 1..1812: note = Variant of DNA polymerase
  source 1..1812: mol_type = other DNA
atgcatcaccatcaccatcacggtggcagcggtatggttgcaccacagaccaaaaaagaagaggccgtactgccgaacatcaattatacaattgtggaggaagtcaccgaaccgattctcgcggatcgttcggcgttagtggttgaggttctggggtccaactaccataaggctccgatcctgggctttgccctggccaatgggcacggtaacttcttcattcgcactgacacggctcttagctctccgctgtttaccgcgtggctggaggatgagagcaagaagaaatcagtattcgacgctaaacgcgcaatcgtggccctgaaatggaaaggcattgaattacgtggcatcgaatttgacttgttgctggcttcatatctcctgaatccctcgcaaagcacggaagatgtcgcaagcgtggccaagcgcaaacagtacatggcagtacagagtgattgggcagtctatggaaaaggtgcgaaacaaacggtgccagatgaaaacgttttagccgaacatctggtgcgtaaagctgctgcaattcgcgccctggagaaagaactgatccacgatttgcaggaaaatgaacaatacgccctgtttactgaccttgaattacctctgtcctcggtcctggcagagatggaatttaccggtgtgaaagtagatgttgaacgcctgaaagaaatgggcgaggagctcacagaacaactgcgccaagtggagcaggaaatctataagttagctggccaacgcttcaacattaacagccctaaacaactgggtgtcattctgtttgaaaaattacagcttcccgtcctgaagaagacgaagaccggctatagtacgagtgctgatgtgctcgagaaacttgcccgtcagcatgaaatcgtccgcaaaattcttcactaccgtcagctcggtaaactgcaatccacatatattgaagggctgctgaaagttgtacatcgcgacacccataaagtccacaccatcttcaaccaggccctgactcaaaccgggcgcctgtcaagcaccgaacctaatctccagaacatcccaattcgtctggaagaaggccgcaaaattcgccaagcatttgtgccatcgaaacctgactgggttatctttagcgcagattactcacagattgagctccgtgttctcgcacacctggcaaacgatgaaaatctgatcgatgcttttcgtcatgaccttgacatccatacgaagacagccatggatattttccatgtaacagcagatgaagttacccccaatatgcgtcgccaagcaaaagccgtgaacttcggtattgtctatgggatctctgattacggtctgagtcagcgtcttggcatcacgcgcaaagaagccgccgaatttattcgtcgttatttcgaaagctttcccggcgttaaacagtacatggagaatattgtaaaagaagccaaacagaaaggatacgtcaccacccttttacaccgccgccgctatctgccagacatccattctcgtaatcgcaacttacgttcattcgcagaacgcacggccatgaacaccccaattcaaggatcagccgccgacatcatcaagaaggcaatgattgatttagctgatcgtctgaaacgcgagaaacttcaagctcgtatgctgctccaggttcatgacgaactgattcttgaagctcctcgtgaggaagtcgaacgcctggttcagattgtacccgaggtcatggagaacgccatccagttaaccgtcccactgaaagttgattatcactacggtcctacgtggtacgacgctaag

SEQ ID NO: 372 - protein, 604 aa, synthetic construct
  REGION 1..604: note = Variant of DNA polymerase
MHHHHHHGGSGMVAPQTKKEEAVLPNINYTIVEEVTEPILADRSALVVEVLGSNYHKAPILGFALANGHGNFFIRTDTALSSPLFTAWLEDESKKKSVFDAKRAIVALKWKGIELRGIEFDLLLASYLLNPSQSTEDVASVAKRKQYMAVQSDWAVYGKGAKQTVPDENVLAEHLVRKAAAIRALEKELIHDLQENEQYALFTDLELPLSSVLAEMEFTGVKVDVERLKEMGEELTEQLRQVEQEIYKLAGQRFNINSPKQLGVILFEKLQLPVLKKTKTGYSTSADVLEKLARQHEIVRKILHYRQLGKLQSTYIEGLLKVVHRDTHKVHTIFNQALTQTGRLSSTEPNLQNIPIRLEEGRKIRQAFVPSKPDWVIFSADYSQIELRVLAHLANDENLIDAFRHDLDIHTKTAMDIFHVTADEVTPNMRRQAKAVNFGIVYGISDYGLSQRLGITRKEAAEFIRRYFESFPGVKQYMENIVKEAKQKGYVTTLLHRRRYLPDIHSRNRNLRSFAERTAMNTPIQGSAADIIKKAMIDLADRLKREKLQARMLLQVHDELILEAPREEVERLVQIVPEVMENAIQLTVPLKVDYHYGPTWYDAK

SEQ ID NO: 373 - DNA, 1812 bp, synthetic construct
  misc_feature 1..1812: note = Variant of DNA polymerase
  source 1..1812: mol_type = other DNA
atgcatcaccatcaccatcacggtggcagcggtatggttgcaccacagaccaaaaaagaagaggccgtactgccgaacatcaattatacaattgtggaggaagtcaccgaaccgattctcgcggatcgttcggcgttagtggttgaggttctggggtccaactaccataaggctccgatcctgggctttgccctggccaatgaacacggtaacttcttcattcgcactgacacggctctttcttctccgctgtttaccgcgtggctggaggatgagagcaagaagaaatcagtattcgacgctaaacgcgcaatcgtggccctgaaatggaaaggcattgaattacgtggcatcgaatttgacttgttgctggcttcatatctcctgaatccctcgcaaagcacggaagatgtcgcaagcgtggccaagcgcaaacagtacatggcagtacagagtgattgggcagtctatggaaaaggtgcgaaacaaacggtgccagatgaaaacgttttagccgaacatctggtgcgtaaagctgctgcaattcgcgccctggagaaagaactgatccacgatttgcaggaaaatgaacaatacgccctgtttactgaccttgaattacctctgtcctcggtcctggcagagatggaatttaccggtgtgaaagtagatgttaagcgcctgaaacaaatgggcgaggagctcacagaacaactgcgccaagtggagcaggaaatctataagttagctggccaacgcttcaacattaacagccctaaacaactgggtgtcattctgtttgaaaaattacagcttcccgtcctgaagaagacgaagaccggctatagtacgagtgctgatgtgctcgagaaacttgcccgtcagcatgaaatcgtccgcaaaattcttcactaccgtcagctcggtaaactgcaatccacatatattgaagggctgctgaaagttgtacatcgcgacacccataaagtccacaccatcttcaaccaggccctgactcaaaccgggcgcctgtcaagcaccgaacctaatctccagaacatcccaattcgtctggaagaaggccgcaaaattcgccaagcatttgtgccatcgaaacctgactgggttatctttagcgcagattactcacagattgagctccgtgttctcgcacacctggcaaacgatgaaaatctgatcgatgcttttcgtcatgaccttgacatccatacgaagacagccatggatattttccatgtaacagcagatgaagttacccccaatatgcgtcgccaagcaaaagccgtgaacttcggtattgtctatgggatctctgattacggtctgagtcagcgtcttggcatcacgcgcaaagaagccgccgaatttattcgtcgttatttcgaaagctttcccggcgttaaacagtacatggagaatattgtaaaagaagccaaacagaaaggatacgtcaccacccttttacaccgccgccgctatctgccagacatccattctcgtaatcgcaacttacgttcattcgcagaacgcacggccatgaacaccccaattcaaggatcagccgccgacatcatcaagaaggcaatgattgatttagctgatcgtctgaaacgcgagaaacttcaagctcgtatgctgctccaggttcatgacgaactgattcttgaagctcctcgtgaggaagtcgaacgcctggttcagattgtacccgaggtcatggagaacgccatccagttaaccgtcccactgaaagttgattatcactacggtcctacgtggtacgacgctaag

SEQ ID NO: 374 - protein, 604 aa, synthetic construct
  REGION 1..604: note = Variant of DNA polymerase
MHHHHHHGGSGMVAPQTKKEEAVLPNINYTIVEEVTEPILADRSALVVEVLGSNYHKAPILGFALANEHGNFFIRTDTALSSPLFTAWLEDESKKKSVFDAKRAIVALKWKGIELRGIEFDLLLASYLLNPSQSTEDVASVAKRKQYMAVQSDWAVYGKGAKQTVPDENVLAEHLVRKAAAIRALEKELIHDLQENEQYALFTDLELPLSSVLAEMEFTGVKVDVKRLKQMGEELTEQLRQVEQEIYKLAGQRFNINSPKQLGVILFEKLQLPVLKKTKTGYSTSADVLEKLARQHEIVRKILHYRQLGKLQSTYIEGLLKVVHRDTHKVHTIFNQALTQTGRLSSTEPNLQNIPIRLEEGRKIRQAFVPSKPDWVIFSADYSQIELRVLAHLANDENLIDAFRHDLDIHTKTAMDIFHVTADEVTPNMRRQAKAVNFGIVYGISDYGLSQRLGITRKEAAEFIRRYFESFPGVKQYMENIVKEAKQKGYVTTLLHRRRYLPDIHSRNRNLRSFAERTAMNTPIQGSAADIIKKAMIDLADRLKREKLQARMLLQVHDELILEAPREEVERLVQIVPEVMENAIQLTVPLKVDYHYGPTWYDAK

SEQ ID NO: 375 - DNA, 1812 bp, synthetic construct
  misc_feature 1..1812: note = Variant of DNA polymerase
  source 1..1812: mol_type = other DNA
atgcatcaccatcaccatcacggtggcagcggtatggttgcaccacagaccaaaaaagaagaggccgtactgccgaacatcaattatacaattgtggaggaagtcaccgaaccgattctcgcggatcgttcggcgttagtggttgaggttctggggtccaactaccataaggctccgatcctgggctttgccctggccaatgaacacggtaacttcttcattcgcactgacacggctctttcttctccgctgtttaccgcgtggctggaggatgagagcaagaagaaatcagtattcgacgctaaacgcgcaatcgtggccctgaaatggaaaggcattgaattacgtggcatcgaatttgacttgttgctggcttcatatctcctgaatccctcgcaaagcacggaagatgtcgcaagcgtggccaagcgcaaacagtacatggcagtacagagtgattgggcagtctatggaaaaggtgcgaaacaaacggtgccagatgaaaacgttttagccgaacatctggtgcgtaaagctgctgcaattcgcgccctggagaaagaactgatccacgatttgcaggaaaatgaacaatacgccctgtttactgaccttgaattacctctgtcctcggtcctggcagagatggaatttaccggtgtgaaagtagatgttgaacgcctgaaagaaatgggcgaggagctcacagaacaactgcgccaagtggagcaggaaatctataagttagctggccaacgcttcaacattaacagccctaaacaactgggtgtcattctgtttgaaaaattacagcttcccgtcctgaagaagacgaagaccggctatagtacgagtgctgatgtgctcgagaaacttgcccgtcagcatgaaatcgtccgcaaaattcttcactaccgtcagctcggtaaactgcaatccacatatattgaagggctgctgaaagttgtacatcgcgacacccataaagtccacaccatcttcaaccaggccctgactcaaaccgggcgcctgtcaagcaccgaacctaatctccagaacatcccaattcgtctggaagaaggccgcaaaattcgccaagcatttgtgccatcgaaacctgagtgggttatctttagcgcagattactcacagattgagctccgtgttctcgcacacctggcaaacgatgaaaatctgatcgatgcttttcgtcatgaccttgacatccatacgaagacagccatggatattttccatgtaacagcagatgaagttacccccaatatgcgtcgccaagcaaaagccgtgaacttcggtattgtctatgggatctctgattacggtctgagtcagcgtcttggcatcacgcgcaaagaagccgccgaatttattcgtcgttatttcgaaagctttcccggcgttaaacagtacatggagaatattgtaaaagaagcccgtcagaaaggatacgtcaccacccttttacaccgccgccgctatctgccagacatccattctcgtaatcgcaacttacgttcattcgcagaacgcacggccatgaacaccccaattcaaggatcagccgccgacatcatcaagaaggcaatgattgatttagctgatcgtctgaaacgcgagaaacttcaagctcgtatgctgctccaggttcatgacgaactgattcttgaagctcctcgtgaggaagtcgaacgcctggttcagattgtacccgaggtcatggagaacgccatccagttaaccgtcccactgaaagttgattatcactacggtcctacgtggtacgacgctaag

SEQ ID NO: 376 - protein, 604 aa, synthetic construct
  REGION 1..604: note = Variant of DNA polymerase
MHHHHHHGGSGMVAPQTKKEEAVLPNINYTIVEEVTEPILADRSALVVEVLGSNYHKAPILGFALANEHGNFFIRTDTALSSPLFTAWLEDESKKKSVFDAKRAIVALKWKGIELRGIEFDLLLASYLLNPSQSTEDVASVAKRKQYMAVQSDWAVYGKGAKQTVPDENVLAEHLVRKAAAIRALEKELIHDLQENEQYALFTDLELPLSSVLAEMEFTGVKVDVERLKEMGEELTEQLRQVEQEIYKLAGQRFNINSPKQLGVILFEKLQLPVLKKTKTGYSTSADVLEKLARQHEIVRKILHYRQLGKLQSTYIEGLLKVVHRDTHKVHTIFNQALTQTGRLSSTEPNLQNIPIRLEEGRKIRQAFVPSKPEWVIFSADYSQIELRVLAHLANDENLIDAFRHDLDIHTKTAMDIFHVTADEVTPNMRRQAKAVNFGIVYGISDYGLSQRLGITRKEAAEFIRRYFESFPGVKQYMENIVKEARQKGYVTTLLHRRRYLPDIHSRNRNLRSFAERTAMNTPIQGSAADIIKKAMIDLADRLKREKLQARMLLQVHDELILEAPREEVERLVQIVPEVMENAIQLTVPLKVDYHYGPTWYDAK

SEQ ID NO: 377 - DNA, 1812 bp, synthetic construct
  misc_feature 1..1812: note = Variant of DNA polymerase
  source 1..1812: mol_type = other DNA
atgcatcaccatcaccatcacggtggcagcggtatggttgcaccacagaccaaaaaagaagaggccgtactgccgaacatcaattatacaattgtggaggaagtcaccgaaccgattctcgcggatcgttcggcgttagtggttgaggttctggggtccaactaccataaggctccgatcctgggctttgccctggccaatgagcacggtaacttcttcattcgcactgacacggctcttcgctctccgctgtttaccgcgtggctggaggatgagagcaagaagaaatcagtattcgacgctaaacgcgcaatcgtggccctgaaatggaaaggcattagcttacgtggcatcgaatttgacttgttgctggcttcatatctcctgaatccctcgcaaagcacggaagatgtcgcaagcgtggccaagcgcaaacagtacatggcagtacagagtgattgggcagtctatggaaaaggtgcgaaacaaacggtgccagatgaaaacgttttagccgaacatctggtgcgtaaagctgctgcaattcgcgccctggagaaagaactgatccacgatttgcaggaaaatgaacaatacgccctgtttactgaccttgaattacctctgtcctcggtcctggcagagatggaatttaccggtgtgaaagtagatgttgaacgcctgaaagaaatgggcgaggagctcacagaacaactgcgccaagtggagcaggaaatctataagttagctggccaacgcttcaacattaacagccctaaacaactgggtgtcattctgtttgaaaaattacagcttcccgtcctgaagaagacgaagaccggctatagtacgagtgctgatgtgctcgagaaacttgcccgtcagcatgaaatcgtccgcaaaattcttcactaccgtcagctcggtaaactgcaatccacatatattgaagggctgctgaaagttgtacatcgcgacacccataaagtccacaccatcttcaaccaggccctgactcaaaccgggcgcctgtcaagcaccgaacctaatctccagaacatcccaattcgtctggaagaaggccgcaaaattcgccaagcatttgtgccatcgaaacctgactgggttatctttagcgcagattactcacagattgagctccgtgttctcgcacacctggcaaacgatgaaaatctgatcgatgcttttcgtcatgaccttgacatccatacgaagacagccatggatattttccatgtaacagcagatgaagttacccccaatatgcgtcgccaagcaaaagccgtgaacttcggtattgtctatgggatctctgattacggtctgagtcagcgtcttggcatcacgcgcaaagaagccgccgaatttattcgtcgttatttcgaaagctttcccggcgttaaacagtacatggagaatattgtaaaagaagccaaacagaaaggatacgtcaccacccttttacaccgccgccgctatctgccagacatccattctcgtaatcgcaacttacgttcattcgcagaacgcacggccatgaacaccccaattcaaggatcagccgccgacatcatcaagaaggcaatgattgatttagctgatcgtctgaaacgcgagaagcttcaagctcgtatgctgctccaggttcatgacgaactgattcttgaagctcctcgtgaggaagtcgaacgcctggttcagattgtacccgaggtcatggagaacgccatccagttaaccgtcccactgaaagttgattatcactacggtcctacgtggtacgacgctaag

SEQ ID NO: 378 - protein, 604 aa, synthetic construct
  REGION 1..604: note = Variant of DNA polymerase
MHHHHHHGGSGMVAPQTKKEEAVLPNINYTIVEEVTEPILADRSALVVEVLGSNYHKAPILGFALANEHGNFFIRTDTALRSPLFTAWLEDESKKKSVFDAKRAIVALKWKGISLRGIEFDLLLASYLLNPSQSTEDVASVAKRKQYMAVQSDWAVYGKGAKQTVPDENVLAEHLVRKAAAIRALEKELIHDLQENEQYALFTDLELPLSSVLAEMEFTGVKVDVERLKEMGEELTEQLRQVEQEIYKLAGQRFNINSPKQLGVILFEKLQLPVLKKTKTGYSTSADVLEKLARQHEIVRKILHYRQLGKLQSTYIEGLLKVVHRDTHKVHTIFNQALTQTGRLSSTEPNLQNIPIRLEEGRKIRQAFVPSKPDWVIFSADYSQIELRVLAHLANDENLIDAFRHDLDIHTKTAMDIFHVTADEVTPNMRRQAKAVNFGIVYGISDYGLSQRLGITRKEAAEFIRRYFESFPGVKQYMENIVKEAKQKGYVTTLLHRRRYLPDIHSRNRNLRSFAERTAMNTPIQGSAADIIKKAMIDLADRLKREKLQARMLLQVHDELILEAPREEVERLVQIVPEVMENAIQLTVPLKVDYHYGPTWYDAK

SEQ ID NO: 379 - DNA, 1812 bp, synthetic construct
  misc_feature 1..1812: note = Variant of DNA polymerase
  source 1..1812: mol_type = other DNA
atgcatcaccatcaccatcacggtggcagcggtatggttgcaccacagaccaaaaaagaagaggccgtactgccgaacatcaattatacaattgtggaggaagtcaccgaaccgattctcgcggatcgttcggcgttagtggttgaggttctggggtccaactaccataaggctccgatcctgggctttgccctggccaatgaacacggtaacttcttcattcgcactgacacggctctttcttctccgctgtttaccgcgtggctggaggatgagagcaagaagaaatcagtattcgacgctaaacgcgcaatcgtggccctgaaatggaaaggcattgaattacgtggcatcgaatttgacttgttgctggcttcatatctcctgaatccctcgcaaagcacggaagatgtcgcaagcgtggccaagcgcaaacagtacatggcagtacagagtgattgggcagtctatggaaaaggtgcgaaacaaacggtgccagatgaaaacgttttagccgaacatctggtgcgtaaagctgctgcaattcgcgccctggagaaagaactgatccacgatttgcaggaaaatgaacaatacgccctgtttactgaccttgaattacctctgtcctcggtcctggcagagatggaatttaccggtgtgaaagtagatgttgaacgcctgaaagaaatgggcgaggagctcacagaacaactgcgccaagtggagcaggaaatctataagttagctggccaacgcttcaacattaacagccctaaacaactgggtgtcattctgtttgaaaaattacagcttcccgtcctgggtaagacgaagaccggctatagtacgagtgctgatgtgctcgagaaacttgcccgtcagcatgaaatcgtccgcaaaattcttcactaccgtcagctcggtaaactgcaatccacatatattgaagggctgctgaaagttgtacatcgcgacacccataaagtccacaccatcttcaaccaggccctgactcaaaccgggcgcctgtcaagcaccgaacctaatctccagaacatcccaattcgtctggaagaaggccgcaaaattcgccaagcatttgtgccatcgaaacctgactgggttatctttagcgcagattactcacagattgagctccgtgttctcgcacacctggcaaacgatgaaaatctgatcgatgcttttcgtcatgaccttgacatccatacgaagacagccatggatattttccatgtaacagcagatgaagttacccccaatatgcgtcgccaagcaaaagccgtgaacttcggtattgtctatgggatctctgattacggtctgagtcagcgtcttggcatcacgcgcaaagaagccgccgaatttattcgtcgttatttcgaaagctttcccggcgttaaacagtacatggagaatattgtaaaagaagccaaacagaaaggatacgtcaccacccttttacaccgccgccgctatctgccagacatccattctcgtaatcgcaacttacgttcattcgcagaacgcacggccatgaacaccccaattcaaggatcagccgccgacatcatcaagaaggcaatgattgatttagctgatcgtctgaaacgcgagaaacttcaagctcgtatgctgctccaggttcatgacgaactgattcttgaagctcctcgtgaggaagtcgaacgcctggttcagattgtacccgaggtcatggagaacgccatccagttaaccgtcccactgaaagttgattatcactacggtcctacgtggtacgacgctaag

SEQ ID NO: 380 - protein, 604 aa, synthetic construct
  REGION 1..604: note = Variant of DNA polymerase
MHHHHHHGGSGMVAPQTKKEEAVLPNINYTIVEEVTEPILADRSALVVEVLGSNYHKAPILGFALANEHGNFFIRTDTALSSPLFTAWLEDESKKKSVFDAKRAIVALKWKGIELRGIEFDLLLASYLLNPSQSTEDVASVAKRKQYMAVQSDWAVYGKGAKQTVPDENVLAEHLVRKAAAIRALEKELIHDLQENEQYALFTDLELPLSSVLAEMEFTGVKVDVERLKEMGEELTEQLRQVEQEIYKLAGQRFNINSPKQLGVILFEKLQLPVLGKTKTGYSTSADVLEKLARQHEIVRKILHYRQLGKLQSTYIEGLLKVVHRDTHKVHTIFNQALTQTGRLSSTEPNLQNIPIRLEEGRKIRQAFVPSKPDWVIFSADYSQIELRVLAHLANDENLIDAFRHDLDIHTKTAMDIFHVTADEVTPNMRRQAKAVNFGIVYGISDYGLSQRLGITRKEAAEFIRRYFESFPGVKQYMENIVKEAKQKGYVTTLLHRRRYLPDIHSRNRNLRSFAERTAMNTPIQGSAADIIKKAMIDLADRLKREKLQARMLLQVHDELILEAPREEVERLVQIVPEVMENAIQLTVPLKVDYHYGPTWYDAK

SEQ ID NO: 381 - DNA, 1812 bp, synthetic construct
  misc_feature 1..1812: note = Variant of DNA polymerase
  source 1..1812: mol_type = other DNA
atgcatcaccatcaccatcacggtggcagcggtatggttgcaccacagaccaaaaaagaagaggccgtactgccgaacatcaattatacaattgtggaggaagtcaccgaaccgattctcgcggatcgttcggcgttagtggttgaggttctggggtccaactaccataaggctccgatcctgggctttgccctggccaatgagcacggtaacttcttcattcgcactgacacggctctttcttctccgctgtttaccgcgtggctggaggatgagagcaagaagaaatcagtattcgacgctaaacgcgcaatcgtggccctgaaatggaaaggcattgaattacgtggcatcgaatttgacttgttgctggcttcatatctcctgaatccctcgcagacgacggaggatgtcgcaagcgtggccaagcgcaaacagtacatggcagtacagagtgattgggcagtctatggaaaaggtgcgaaacaaacggtgccagatgaaaacgttttagccgaacatctggtgcgtaaagctgctgcaattcgtgccctggagaaagaactgatccacgatttgcaggaaaatgaacaatacgccctgtttactgaccttgaattacctctgtcctcggtcctggcagagatggaatttaccggtgtgaaagtagatgttgaacgcctgaaagaaatgggcgaggagctcacagaacaactgcgccaagtggagcaggaaatctataagttagctggccaacgcttcaacattaacagccctaaacaactgggtgtcattctgtttgaaaaattacagcttcccgtcctgaagaagacgaagaccggctatagtacgagtgctgatgtgctcgagaaacttgcccgtcagcatgaaatcgtccgcaaaattcttcactaccgtcagctcggtaaactgcaatccacatatattgaagggctgctgaaagttgtacatcgcgacacccataaagtccacaccatcttcaaccaggccctgactcaaaccgggcgcctgtcaagcaccgaacctaatctccagaacatcccaattcgtctggaagaaggccgcaaaattcgccaagcatttgtgccatcgaaacctgactgggttatctttagcgcagattactcacagattgagctccgtgttctcgcacacctggcaaacgatgaaaatctgatcgatgcttttcgtcatgaccttgacatccatacgaagacagccatggatattttccatgtaacagcagatgaagttacccccaatatgcgtcgccaagcaaaagccgtgaacttcggtattgtctatgggatctctgattacggtctgagtcagcgtcttggcatcacgcgcaaagaagccgccgaatttattcgtcgttatttcgaaagctttcccggcgttaaacagtacatggagaatattgtaaaagaagccaaacagaaaggatacgtcaccacccttttacaccgccgccgctatctgccagacatccattctcgtaatcgcaacttacgttcattcgcagaacgcacggccatgaacaccccaattcaaggatcagccgccgacatcatcaagaaggcaatgattgatttagctgatcgtctgaaacgcgagaaacttcaagctcgtatgctgctccaggttcatgacgaactgattcttgaagctcctcgtgaggaagtcgaacgcctggttcagattgtacccgaggtcatggagaacgccatccagttaaccgtcccactgaaagttgattatcactacggtcctacgtggtacgacgctaag

SEQ ID NO: 382 - protein, 604 aa, synthetic construct
  REGION 1..604: note = Variant of DNA polymerase
MHHHHHHGGSGMVAPQTKKEEAVLPNINYTIVEEVTEPILADRSALVVEVLGSNYHKAPILGFALANEHGNFFIRTDTALSSPLFTAWLEDESKKKSVFDAKRAIVALKWKGIELRGIEFDLLLASYLLNPSQTTEDVASVAKRKQYMAVQSDWAVYGKGAKQTVPDENVLAEHLVRKAAAIRALEKELIHDLQENEQYALFTDLELPLSSVLAEMEFTGVKVDVERLKEMGEELTEQLRQVEQEIYKLAGQRFNINSPKQLGVILFEKLQLPVLKKTKTGYSTSADVLEKLARQHEIVRKILHYRQLGKLQSTYIEGLLKVVHRDTHKVHTIFNQALTQTGRLSSTEPNLQNIPIRLEEGRKIRQAFVPSKPDWVIFSADYSQIELRVLAHLANDENLIDAFRHDLDIHTKTAMDIFHVTADEVTPNMRRQAKAVNFGIVYGISDYGLSQRLGITRKEAAEFIRRYFESFPGVKQYMENIVKEAKQKGYVTTLLHRRRYLPDIHSRNRNLRSFAERTAMNTPIQGSAADIIKKAMIDLADRLKREKLQARMLLQVHDELILEAPREEVERLVQIVPEVMENAIQLTVPLKVDYHYGPTWYDAK

SEQ ID NO: 383 - DNA, 1812 bp, synthetic construct
  misc_feature 1..1812: note = Variant of DNA polymerase
  source 1..1812: mol_type = other DNA
atgcatcaccatcaccatcacggtggcagcggtatggttgcaccacagaccaaaaaagaagaggccgtactgccgaacatcaattatacaattgtggaggaagtcaccgaaccgattctcgcggatcgttcggcgttagtggttgaggttctggggtccaactaccataaggctccgatcctgggctttgccctggccaatgaacacggtaacttcttcattcgcactgacacggctctttcttctccgctgtttaccgcgtggctggaggatgagagcaagaagaaatcagtattcgacgctaaacgcgcaatcgtggccctgaaatggaaaggcattgaattacgtggcatcgaatttgacttgttgctggcttcatatctcctgaatccctcgcaaagcacggaagatgtcgcaagcgtggccaagcgcaaacagtacatggcagtacagagtgattgggcagtctatggaaaaggtgcgaaacaaacggtgccagatgaaaacgttttagccgaacatctggtgcgtaaagctgctgcaattcgcgccctggagaaagaactgatccacgatttgcaggaaaatgaacaatacgccctgtttactgaccttgaattacctctgtcctcggtcctggcagagatggaatttaccggtgtgaaagtagatgttgaacgcctgaaagaaatgggcgaggagctcacagaacaactgcgccaagtggagcaggaaatctataagttagctggccaacgcttcaacattaacagccctaaacaactgggtgtcattctgtttgaaaaattacagcttcccgtcctgaagaagacgaagaccggctatagtacgagtgctgatgtgctcgagaaacttgcccgtcagcatgaaatcgtccgcaaaattcttcactaccgtcagctcggtaaactgcaatccacatatattgaagggctgctgaaagttgtacatcgcgacacccataaagtccacaccatcttcaaccaggccctgactcaaaccgggcgcctgtcaagcaccgaacctaatctccagaacatcccaattcgtctggaagaaggccgcaaaattcgccaagcatttgtgccatcgaaacctgactgggttatctttagcgcagattactcacagattgagctccgtgttctcgcacacctggcaaacgatgaaaatctgatcgatgcttttcgtcatgaccttgacatccatacgaagacagccatggatattttccatgtaacagcagatgaagttacccccaatatgcgtcgccaagcaaaagccgtgaacttcggtattgtctatgggatctctgattacggtctgagtcagcgtcttggcatcacgcgcaaagaagccgccgaatttattcgtcgttatttcgaaagctttcccggcgttaaacagtacatggagaatattgtaaaagaagccaaacagaaaggatacgtcaccacccttttacaccgccgccgctatctgccagacatccattctcgtaatcgcaacttacgttcattcgcagaacgcacggccatgaacaccccaattcaaggatcagccgccgacatcatcaagaaggcaatgattgatttagctgatcgtctgaaacgcgagaaacttcaagctcgtatgctgctccaggttcatgacgaactgattcttgaagctcctcgtgaggaagtcgaacgcctggttcagattgtacccgaggtcatggagaacgccatccagttaaccgtcccactgaaagttgattatcactacggtcctacgtggtacgacgctaag

SEQ ID NO: 384 - protein, 604 aa, synthetic construct
  REGION 1..604: note = Variant of DNA polymerase
MHHHHHHGGSGMVAPQTKKEEAVLPNINYTIVEEVTEPILADRSALVVEVLGSNYHKAPILGFALANEHGNFFIRTDTALSSPLFTAWLEDESKKKSVFDAKRAIVALKWKGIELRGIEFDLLLASYLLNPSQSTEDVASVAKRKQYMAVQSDWAVYGKGAKQTVPDENVLAEHLVRKAAAIRALEKELIHDLQENEQYALFTDLELPLSSVLAEMEFTGVKVDVERLKEMGEELTEQLRQVEQEIYKLAGQRFNINSPKQLGVILFEKLQLPVLKKTKTGYSTSADVLEKLARQHEIVRKILHYRQLGKLQSTYIEGLLKVVHRDTHKVHTIFNQALTQTGRLSSTEPNLQNIPIRLEEGRKIRQAFVPSKPDWVIFSADYSQIELRVLAHLANDENLIDAFRHDLDIHTKTAMDIFHVTADEVTPNMRRQAKAVNFGIVYGISDYGLSQRLGITRKEAAEFIRRYFESFPGVKQYMENIVKEAKQKGYVTTLLHRRRYLPDIHSRNRNLRSFAERTAMNTPIQGSAADIIKKAMIDLADRLKREKLQARMLLQVHDELILEAPREEVERLVQIVPEVMENAIQLTVPLKVDYHYGPTWYDAK

SEQ ID NO: 385 - DNA, 1812 bp, synthetic construct
  misc_feature 1..1812: note = Variant of DNA polymerase
  source 1..1812: mol_type = other DNA
atgcatcaccatcaccatcacggtggcagcggtatggttgcaccacagaccaaaaaagaagaggccgtactgccgaacatcaattatacaattgtggaggaagtcaccgaaccgattctcgcggatcgttcggcgttagtggttgaggttctggggtccaactaccataaggctccgatcctgggctttgccctggccaatgagcacggtaacttcttcattcgcactgacacggctcttcgctctccgctgtttaccgcgtggctggaggatgagagcaagaagaaatcagtattcgacgctaaacgcgcaatcgtggccctgaaatggaaaggcattgaattacgtggcatcgaatttgacttgttgctggcttcatatctcctgaatccctcgcaaagcacggaagatgtcgcaagcgtggccaagcgcaaacagtacatggcagtacagagtgattgggcagtctatggaaaaggtgcgaaacaaacggtgccagatgaaaacgttttagccgaacatctggtgcgtaaagctgctgcaattcctgccctggagaaagaactgatccacgatttgcaggaaaatgaacaatacgccctgtttactgaccttgaattacctctgtcctcggtcctggcagagatggaatttaccggtgtgaaagtagatgttgaacgcctgaaagaaatgggcgaggagctcacagaacaactgcgccaagtggagcaggaaatctataagttagctggccaacgcttcaacattaacagccctaaacaactgggtgtcattctgtttgaaaaattacagcttcccgtcctgaagaagacgaagaccggctatagtacgagtgctgatgtgctcgagaaacttgcccgtcagcatgaaatcgtccgcaaaattcttcactaccgtcagctcggtaaactgcaatccacatatattgaagggctgctgaaagttgtacatcgcgacacccataaagtccacaccatcttcaaccaggccctgactcaaaccgggcgcctgtcaagcaccgaacctaatctccagaacatcccaattcgtctggaagaaggccgcaaaattcgccaagcatttgtgccatcgaaacctgactgggttatctttagcgcagattactcacagattgagctccgtgttctcgcacacctggcaaacgatgaaaatctgatcgatgcttttcgtcatgaccttgacatccatacgaagacagccatggatattttccatgtaacagcagatgaagttacccccaatatgcgtcgccaagcaaaagccgtgaacttcggtattgtctatgggatctctgattacggtctgagtcagcgtcttggcatcacgcgcaaagaagccgccgaatttattcgtcgttatttcgaaagctttcccggcgttaaacagtacatggagaatattgtaaaagaagccaaacagaaaggatacgtcaccacccttttacaccgccgccgctatctgccagacatccattctcgtaatcgcaacttacgttcattcgcagaacgcacggccatgaacaccccaattcaaggatcagccgccgacatcatcaagaaggcaatgattgatttagctgatcgtctgaaacgcgaggcacttcaagctcgtatgctgctccaggttcatgacgaactgattcttgaagctcctcgtgaggaagtcgaacgcctggttcagattgtacccgaggtcatggagaacgccatccagttaaccgtcccactgaaagttgattatcactacggtcctacgtggtacgacgctaag

SEQ ID NO: 386 - protein, 604 aa, synthetic construct
  REGION 1..604: note = Variant of DNA polymerase
MHHHHHHGGSGMVAPQTKKEEAVLPNINYTIVEEVTEPILADRSALVVEVLGSNYHKAPILGFALANEHGNFFIRTDTALRSPLFTAWLEDESKKKSVFDAKRAIVALKWKGIELRGIEFDLLLASYLLNPSQSTEDVASVAKRKQYMAVQSDWAVYGKGAKQTVPDENVLAEHLVRKAAAIPALEKELIHDLQENEQYALFTDLELPLSSVLAEMEFTGVKVDVERLKEMGEELTEQLRQVEQEIYKLAGQRFNINSPKQLGVILFEKLQLPVLKKTKTGYSTSADVLEKLARQHEIVRKILHYRQLGKLQSTYIEGLLKVVHRDTHKVHTIFNQALTQTGRLSSTEPNLQNIPIRLEEGRKIRQAFVPSKPDWVIFSADYSQIELRVLAHLANDENLIDAFRHDLDIHTKTAMDIFHVTADEVTPNMRRQAKAVNFGIVYGISDYGLSQRLGITRKEAAEFIRRYFESFPGVKQYMENIVKEAKQKGYVTTLLHRRRYLPDIHSRNRNLRSFAERTAMNTPIQGSAADIIKKAMIDLADRLKREALQARMLLQVHDELILEAPREEVERLVQIVPEVMENAIQLTVPLKVDYHYGPTWYDAK

SEQ ID NO: 387 - DNA, 1812 bp, synthetic construct
  misc_feature 1..1812: note = Variant of DNA polymerase
  source 1..1812: mol_type = other DNA
atgcatcaccatcaccatcacggtggcagcggtatggttgcaccacagaccaaaaaagaagaggccgtactgccgaacatcaattatacaattgtggaggaagtcaccgaaccgattctcgcggatcgttcggcgttagtggttgaggttctggggtccaactaccataaggctccgatcctgggctttgccctggccaatgggcacggtaacttcttcattcgcactgacacggctcttcgctctccgctgtttaccgcgtggctggaggatgagagcaagaagaaatcagtattcgacgctaaacgcgcaatcgtggccctgaaatggaaaggcattgaattacgtggcatcgaatttgacttgttgctggcttcatatctcctgaatccctcggcccgtacggaggatgtcgcaagcgtggccaagcgcaaacagtacatggcagtacagagtgattgggcagtctatggaaaaggtgcgaaacaaacggtgccagatgaaaacgttttagccgaacatctggtgcgtaaagctgctgcaattcgtgccctggagaaagaactgatccacgatttgcaggaaaatgaacaatacgccctgtttactgaccttgaattacctctgtcctcggtcctggcagagatggaatttaccggtgtgaaagtagatgttgaacgcctgaaagaaatgggcgaggagctcacagaacaactgcgccaagtggagcaggaaatctataagttagctggccaacgcttcaacattaacagccctaaacaactgggtgtcattctgtttgaaaaattacagcttcccgtcctgaagaagacgaagaccggctatagtacgagtgctgatgtgctcgagaaacttgcccgtcagcatgaaatcgtccgcaaaattcttcactaccgtcagctcggtaaactgcaatccacatatattgaagggctgctgaaagttgtacatcgcgacacccataaagtccacaccatcttcaaccaggccctgactcaaaccgggcgcctgtcaagcaccgaacctaatctccagaacatcccaattcgtctggaagaaggccgcaaaattcgccaagcatttgtgccatcgaaacctgactgggttatctttagcgcagattactcacagattgagctccgtgttctcgcacacctggcaaacgatgaaaatctgatcgatgcttttcgtcatgaccttgacatccatacgaagacagccatggatattttccatgtaacagcagatgaagttacccccaatatgcgtcgccaagcaaaagccgtgaacttcggtattgtctatgggatctctgattacggtctgagtcagcgtcttggcatcacgcgcaaagaagccgccgaatttattcgtcgttatttcgaaagctttcccggcgttaaacagtacatggagaatattgtaaaagaagccaaacagaaaggatacgtcaccacccttttacaccgccgccgctatctgccagacatccattctcgtaatcgcaacttacgttcattcgcagaacgcacggccatgaacaccccaattcaaggatcagccgccgacatcatcaagaaggcaatgattgatttagctgatcgtctgaaacgcgagcaccttcaagctcgtatgctgctccaggttcatgacgaactgattcttgaagctcctcgtgaggaagtcgaacgcctggttcagattgtacccgaggtcatggagaacgccatccagttaaccgtcccactgaaagttgattatcactacggtcctacgtggtacgacgctaag

SEQ ID NO: 388 - protein, 604 aa, synthetic construct
  REGION 1..604: note = Variant of DNA polymerase
MHHHHHHGGSGMVAPQTKKEEAVLPNINYTIVEEVTEPILADRSALVVEVLGSNYHKAPILGFALANGHGNFFIRTDTALRSPLFTAWLEDESKKKSVFDAKRAIVALKWKGIELRGIEFDLLLASYLLNPSARTEDVASVAKRKQYMAVQSDWAVYGKGAKQTVPDENVLAEHLVRKAAAIRALEKELIHDLQENEQYALFTDLELPLSSVLAEMEFTGVKVDVERLKEMGEELTEQLRQVEQEIYKLAGQRFNINSPKQLGVILFEKLQLPVLKKTKTGYSTSADVLEKLARQHEIVRKILHYRQLGKLQSTYIEGLLKVVHRDTHKVHTIFNQALTQTGRLSSTEPNLQNIPIRLEEGRKIRQAFVPSKPDWVIFSADYSQIELRVLAHLANDENLIDAFRHDLDIHTKTAMDIFHVTADEVTPNMRRQAKAVNFGIVYGISDYGLSQRLGITRKEAAEFIRRYFESFPGVKQYMENIVKEAKQKGYVTTLLHRRRYLPDIHSRNRNLRSFAERTAMNTPIQGSAADIIKKAMIDLADRLKREHLQARMLLQVHDELILEAPREEVERLVQIVPEVMENAIQLTVPLKVDYHYGPTWYDAK

SEQ ID NO: 389 - DNA, 1812 bp, synthetic construct
  misc_feature 1..1812: note = Variant of DNA polymerase
  source 1..1812: mol_type = other DNA
atgcatcaccatcaccatcacggtggcagcggtatggttgcaccacagaccaaaaaagaagaggccgtactgccgaacatcaattatacaattgtggaggaagtcaccgaaccgattctcgcggatcgttcggcgttagtggttgaggttctggggtccaactaccataaggctccgatcctgggctttgccctggccaatgaacacggtaacttcttcattcgcactgacacggctctttcttctccgctgtttaccgcgtggctggaggatgagagcaagaagaaatcagtattcgacgctaaacgcgcaatcgtggccctgaaatggaaaggcattgaattacgtggcatcgaatttgacttgttgctggcttcatatctcctgaatccctcgcaaagcacggaagatgtcgcaagcgtggccaagcgcaaacagtacatggcagtacagagtgattgggcagtctatggaaaaggtgcgaaacaaacggtgccagatgaaaacgttttagccgaacatctggtgcgtaaagctgctgcaattcgcgccctggagaaagaactgatccacgatttgcaggaaaatgaacaatacgccctgtttactgaccttgaattacctctgtcctcggtcctggcagagatggaatttaccggtgtgaaagtagatgttgaacgcctgaaagaaatgggcgaggagctcacagaacaactgcgccaagtggagcaggaaatctataagttagctggccaacgcttcaacattaacagccctaaacaactgggtgtcattctgtttgaaaaattacagcttcccgtcctgaagaagacgaagaccggctatagtacgagtgctgatgtgctcgagaaacttgcccgtcagcatgaaatcgtccgcaaaattcttcactaccgtcagctcggtaaactgcaatccacatatattgaagggctgctgaaagttgtacatcgcgacacccataaagtccacaccatcttcaaccaggccctgactcaaaccgggcgcctgtcaagcaccgaacctaatctccagaacatcccaattcgtctggaagaaggccgcaaaattcgccaagcatttgtgccatcgaaacctgagtgggttatctttagcgcagattactcacagattgagctccgtgttctcgcacacctggcaaacgatgaaaatctgatcgatgcttttcgtcatgaccttgacatccatacgaagacagccatggatattttccatgtaacagcagatgaagttacccccaatatgcgtcgccaagcaaaagccgtgaacttcggtattgtctatgggatctctgattacggtctgagtcagcgtcttggcatcacgcgcaaagaagccgccgaatttattcgtcgttatttcgaaagctttcccggcgttaaacagtacatggagaatattgtaaaagaagccaaacagaaaggatacgtcaccacccttttacaccgccgccgctatctgccagacatccattctcgtaatcgcaacttacgttcattcgcagaacgcacggccatgaacaccccaattcaaggatcagccgccgacatcatcaagaaggcaatgattgatttagctgatcgtctgaaacgcgagaaacttcaagctcgtatgctgctccaggttcatgacgaactgattcttgaagctcctcgtgaggaagtcgaacgcctggttcagattgtacccgaggtcatggagaacgccatccagttaaccgtcccactgaaagttgattatcactacggtcctacgtggtacgacgctaag

SEQ ID NO: 390 - protein, 604 aa, synthetic construct
  REGION 1..604: note = Variant of DNA polymerase
MHHHHHHGGSGMVAPQTKKEEAVLPNINYTIVEEVTEPILADRSALVVEVLGSNYHKAPILGFALANEHGNFFIRTDTALSSPLFTAWLEDESKKKSVFDAKRAIVALKWKGIELRGIEFDLLLASYLLNPSQSTEDVASVAKRKQYMAVQSDWAVYGKGAKQTVPDENVLAEHLVRKAAAIRALEKELIHDLQENEQYALFTDLELPLSSVLAEMEFTGVKVDVERLKEMGEELTEQLRQVEQEIYKLAGQRFNINSPKQLGVILFEKLQLPVLKKTKTGYSTSADVLEKLARQHEIVRKILHYRQLGKLQSTYIEGLLKVVHRDTHKVHTIFNQALTQTGRLSSTEPNLQNIPIRLEEGRKIRQAFVPSKPEWVIFSADYSQIELRVLAHLANDENLIDAFRHDLDIHTKTAMDIFHVTADEVTPNMRRQAKAVNFGIVYGISDYGLSQRLGITRKEAAEFIRRYFESFPGVKQYMENIVKEAKQKGYVTTLLHRRRYLPDIHSRNRNLRSFAERTAMNTPIQGSAADIIKKAMIDLADRLKREKLQARMLLQVHDELILEAPREEVERLVQIVPEVMENAIQLTVPLKVDYHYGPTWYDAK

SEQ ID NO: 391 - DNA, 1812 bp, synthetic construct
  misc_feature 1..1812: note = Variant of DNA polymerase
  source 1..1812: mol_type = other DNA
atgcatcaccatcaccatcacggtggcagcggtatggttgcaccacagaccaaaaaagaagaggccgtactgccgaacatcaattatacaattgtggaggaagtcaccgaaccgattctcgcggatcgttcggcgttagtggttgaggttctggggtccaactaccataaggctccgatcctgggctttgccctggccaatgagcacggtaacttcttcattcgcactgacacggctctttcttctccgctgtttaccgcgtggctggaggatgggagcaagaagaaatcagtattcgacgctaaacgcgcaatcgtggccctgaaatggaaaggcattgaattacgtggcatcgaatttgacttgttgctggcttcatatctcctgaatccctcggccagtacggaggatgtcgcaagcgtggccaagcgcaaacagtacatggcagtacagagtgattgggcagtctatggaaaaggtgcgaaacaaacggtgccagatgaaaacgttttagccgaacatctggtgcgtaaagctgctgcaattcgcgccctggagaaagaactgatccacgatttgcaggaaaatgaacaatacgccctgtttactgaccttgaattacctctgtcctcggtcctggcagagatggaatttaccggtgtgaaagtagatgttgaacgcctgaaagaaatgggcgaggagctcacagaacaactgcgccaagtggagcaggaaatctataagttagctggccaacgcttcaacattaacagccctaaacaactgggtgtcattctgtttgaaaaattacagcttcccgtcctgaagaagacgaagaccggctatagtacgagtgctgatgtgctcgagaaacttgcccgtcagcatgaaatcgtccgcaaaattcttcactaccgtcagctcggtaaactgcaatccacatatattgaagggctgctgaaagttgtacatcgcgacacccataaagtccacaccatcttcaaccaggccctgactcaaaccgggcgcctgtcaagcaccgaacctaatctccagaacatcccaattcgtctggaagaaggccgcaaaattcgccaagcatttgtgccatcgaaacctgactgggttatctttagcgcagattactcacagattgagctccgtgttctcgcacacctggcaaacgatgaaaatctgatcgatgcttttcgtcatgaccttgacatccatacgaagacagccatggatattttccatgtaacagcagatgaagttacccccaatatgcgtcgccaagcaaaagccgtgaacttcggtattgtctatgggatctctgattacggtctgagtcagcgtcttggcatcacgcgcaaagaagccgccgaatttattcgtcgttatttcgaaagctttcccggcgttaaacagtacatggagaatattgtaaaagaagccaaacagaaaggatacgtcaccacccttttacaccgccgccgctatctgccagacatccattctcgtaatcgcaacttacgttcattcgcagaacgcacggccatgaacaccccaattcaaggatcagccgccgacatcatcaagaaggcaatgattgatttagctgatcgtctgaaacgcgagaagcttcaagctcgtatgctgctccaggttcatgacgaactgattcttgaagctcctcgtgaggaagtcgaacgcctggttcagattgtacccgaggtcatggagaacgccatccagttaaccgtcccactgaaagttgattatcactacggtcctacgtggtacgacgctaag

SEQ ID NO: 392 - protein, 604 aa, synthetic construct
  REGION 1..604: note = Variant of DNA polymerase
MHHHHHHGGSGMVAPQTKKEEAVLPNINYTIVEEVTEPILADRSALVVEVLGSNYHKAPILGFALANEHGNFFIRTDTALSSPLFTAWLEDGSKKKSVFDAKRAIVALKWKGIELRGIEFDLLLASYLLNPSASTEDVASVAKRKQYMAVQSDWAVYGKGAKQTVPDENVLAEHLVRKAAAIRALEKELIHDLQENEQYALFTDLELPLSSVLAEMEFTGVKVDVERLKEMGEELTEQLRQVEQEIYKLAGQRFNINSPKQLGVILFEKLQLPVLKKTKTGYSTSADVLEKLARQHEIVRKILHYRQLGKLQSTYIEGLLKVVHRDTHKVHTIFNQALTQTGRLSSTEPNLQNIPIRLEEGRKIRQAFVPSKPDWVIFSADYSQIELRVLAHLANDENLIDAFRHDLDIHTKTAMDIFHVTADEVTPNMRRQAKAVNFGIVYGISDYGLSQRLGITRKEAAEFIRRYFESFPGVKQYMENIVKEAKQKGYVTTLLHRRRYLPDIHSRNRNLRSFAERTAMNTPIQGSAADIIKKAMIDLADRLKREKLQARMLLQVHDELILEAPREEVERLVQIVPEVMENAIQLTVPLKVDYHYGPTWYDAK

SEQ ID NO: 393 - DNA, 1812 bp, synthetic construct
  misc_feature 1..1812: note = Variant of DNA polymerase
  source 1..1812: mol_type = other DNA
atgcatcaccatcaccatcacggtggcagcggtatggttgcaccacagaccaaaaaagaagaggccgtactgccgaacatcaattatacaattgtggaggaagtcaccgaaccgattctcgcggatcgttcggcgttagtggttgaggttctggggtccaactaccataaggctccgatcctgggctttgccctggccaatgaacacggtaacttcttcattcgcactgacacggctctttcttctccgctgtttaccgcgtggctggaggatgagagcaagaagaaatcagtattcgacgctaaacgcgcaatcgtggccctgaaatggaaaggcattgaattacgtggcatcgaatttgacttgttgctggcttcatatctcctgaatccctcgcaaagcacggaagatgtcgcaagcgtggccaagcgcaaacagtacatggcagtacagagtgattgggcagtctatggaaaaggtgcgaaacaaacggtgccagatgaaaacgttttagccgaacatctggtgcgtaaagctgctgcaattcgcgccctggagaaagaactgatccacgatttgcaggaaaatgaacaatacgccctgtttactgaccttgaattacctctgtcctcggtcctggcagagatggaatttaccggtgtgaaagtagatgttgaacgcctgaaagaaatgggcgaggagctcacagaacaactgcgccaagtggagcaggaaatctataagttagctggccaacgcttcaacattaacagccctaaacaactgggtgtcattctgtttgaaaaattacagcttcccgtcctgaagaagacgaagaccggctatagtacgagtgctgatgtgctcgagaaacttgcccgtcagcatgaaatcgtccgcaaaattcttcactaccgtcagctcggtaaactgcaatccacatatattgaagggctgctgaaagttgtacatcgcgacacccataaagtccacaccatcttcaaccaggccctgactcaaaccgggcgcctgtcaagcaccgaacctaatctccagaacatcccaattcgtctggaagaaggccgcaaaattcgccaagcatttgtgccatcgaaagctgactgggttatctttagcgcagattactcacagattgagctccgtgttctcgcacacctggcaaacgatgaaaatctgatcgatgcttttcgccacgaccttgacatccatacgaagacagccatggatattttccatgtaacagcagatgaagttacccccaatatgcgtcgccaagcaaaagccgtgaacttcggtattgtctatgggatctctgattacggtctgagtcagcgtcttggcatcacgcgcaaagaagccgccgaatttattcgtcgttatttcgaaagctttcccggcgttaaacagtacatggagaatattgtaaaagaagccaaacagaaaggatacgtcaccacccttttacaccgccgccgctatctgccagacatccattctcgtaatcgcaacttacgttcattcgcagaacgcacggccatgaacaccccaattcaaggatcagccgccgacatcatcaagaaggcaatgattgatttagctgatcgtctgaaacgcgagaaacttcaagctcgtatgctgctccaggttcatgacgaactgattcttgaagctcctcgtgaggaagtcgaacgcctggttcagattgtacccgaggtcatggagaacgccatccagttaaccgtcccactgaaagttgattatcactacggtcctacgtggtacgacgctaag

SEQ ID NO: 394 - protein, 604 aa, synthetic construct
  REGION 1..604: note = Variant of DNA polymerase
MHHHHHHGGSGMVAPQTKKEEAVLPNINYTIVEEVTEPILADRSALVVEVLGSNYHKAPILGFALANEHGNFFIRTDTALSSPLFTAWLEDESKKKSVFDAKRAIVALKWKGIELRGIEFDLLLASYLLNPSQSTEDVASVAKRKQYMAVQSDWAVYGKGAKQTVPDENVLAEHLVRKAAAIRALEKELIHDLQENEQYALFTDLELPLSSVLAEMEFTGVKVDVERLKEMGEELTEQLRQVEQEIYKLAGQRFNINSPKQLGVILFEKLQLPVLKKTKTGYSTSADVLEKLARQHEIVRKILHYRQLGKLQSTYIEGLLKVVHRDTHKVHTIFNQALTQTGRLSSTEPNLQNIPIRLEEGRKIRQAFVPSKADWVIFSADYSQIELRVLAHLANDENLIDAFRHDLDIHTKTAMDIFHVTADEVTPNMRRQAKAVNFGIVYGISDYGLSQRLGITRKEAAEFIRRYFESFPGVKQYMENIVKEAKQKGYVTTLLHRRRYLPDIHSRNRNLRSFAERTAMNTPIQGSAADIIKKAMIDLADRLKREKLQARMLLQVHDELILEAPREEVERLVQIVPEVMENAIQLTVPLKVDYHYGPTWYDAK

SEQ ID NO: 395 - DNA, 1812 bp, synthetic construct
  misc_feature 1..1812: note = Variant of DNA polymerase
  source 1..1812: mol_type = other DNA
atgcatcaccatcaccatcacggtggcagcggtatggttgcaccacagaccaaaaaagaagaggccgtactgccgaacatcaattatacaattgtggaggaagtcaccgaaccgattctcgcggatcgttcggcgttagtggttgaggttctggggtccaactaccataaggctccgatcctgggctttgccctggccaatgagcacggtaacttcttcattcgcactgacacggctctttcttctccgctgtttaccgcgtggctggaggatgagagcaagaagaaatcagtattcgacgctaaacgcgcaatcgtggccctgaaatggaaaggcattagcttacgtggcatcgaatttgacttgttgctggcttcatatctcctgaatccctcgcaaagcacggaagatgtcgcaagcgtggccaagcgcaaacagtacatggcagtacagagtgattgggcagtctatggaaaaggtgcgaaacaaacggtgccagatgaaaacgttttagccgaacatctggtgcgtaaagctgctgcaattcgcgccctggagaaagaactgatccacgatttgcaggaaaatgaacaatacgccctgtttactgaccttgaattacctctgtcctcggtcctggcagagatggaatttaccggtgtgaaagtagatgttgaacgcctgaaagaaatgggcgaggagctcacagaacaactgcgccaagtggagcaggaaatctataagttagctggccaacgcttcaacattaacagccctaaacaactgggtgtcattctgtttgaaaaattacagcttcccgtcctgaagaagacgaagaccggctatagtacgagtgctgatgtgctcgagaaacttgcccgtcagcatgaaatcgtccgcaaaattcttcactaccgtcagctcggtaaactgcaatccacatatattgaagggctgctgaaagttgtacatcgcgacacccataaagtccacaccatcttcaaccaggccctgactcaaaccgggcgcctgtcaagcaccgaacctaatctccagaacatcccaattcgtctggaagaaggccgcaaaattcgccaagcatttgtgccatcgaaacctgactgggttatctttagcgcagattactcacagattgagctccgtgttctcgcacacctggcaaacgatgaaaatctgatcgatgcttttcgtcatgaccttgacatccatacgaagacagccatggatattttccatgtaacagcagatgaagttacccccaatatgcgtcgccaagcaaaagccgtgaacttcggtattgtctatgggatctctgattacggtctgagtcagcgtcttggcatcacgcgcaaagaagccgccgaatttattcgtcgttatttcgaaagctttcccggcgttaaacagtacatggagaatattgtaaaagaagccaaacagaaaggatacgtcaccacccttttacaccgccgccgctatctgccagacatccattctcgtaatcgcaacttacgttcattcgcagaacgcacggccatgaacaccccaattcaaggatcagccgccgacatcatcaagaaggcaatgattgatttagctgatcgtctgaaacgcgagaaacttcaagctcgtatgctgctccaggttcatgacgaactgattcttgaagctcctcgtgaggaagtcgaacgcctggttcagattgtacccgaggtcatggagaacgccatccagttaaccgtcccactgaaagttgattatcactacggtcctacgtggtacgacgctaag

SEQ ID NO: 396 - protein, 604 aa, synthetic construct
  REGION 1..604: note = Variant of DNA polymerase
MHHHHHHGGSGMVAPQTKKEEAVLPNINYTIVEEVTEPILADRSALVVEVLGSNYHKAPILGFALANEHGNFFIRTDTALSSPLFTAWLEDESKKKSVFDAKRAIVALKWKGISLRGIEFDLLLASYLLNPSQSTEDVASVAKRKQYMAVQSDWAVYGKGAKQTVPDENVLAEHLVRKAAAIRALEKELIHDLQENEQYALFTDLELPLSSVLAEMEFTGVKVDVERLKEMGEELTEQLRQVEQEIYKLAGQRFNINSPKQLGVILFEKLQLPVLKKTKTGYSTSADVLEKLARQHEIVRKILHYRQLGKLQSTYIEGLLKVVHRDTHKVHTIFNQALTQTGRLSSTEPNLQNIPIRLEEGRKIRQAFVPSKPDWVIFSADYSQIELRVLAHLANDENLIDAFRHDLDIHTKTAMDIFHVTADEVTPNMRRQAKAVNFGIVYGISDYGLSQRLGITRKEAAEFIRRYFESFPGVKQYMENIVKEAKQKGYVTTLLHRRRYLPDIHSRNRNLRSFAERTAMNTPIQGSAADIIKKAMIDLADRLKREKLQARMLLQVHDELILEAPREEVERLVQIVPEVMENAIQLTVPLKVDYHYGPTWYDAK

SEQ ID NO: 397 - DNA, 1812 bp, synthetic construct
  misc_feature 1..1812: note = Variant of DNA polymerase
  source 1..1812: mol_type = other DNA
atgcatcaccatcaccatcacggtggcagcggtatggttgcaccacagaccaaaaaagaagaggccgtactgccgaacatcaattatacaattgtggaggaagtcaccgaaccgattctcgcggatcgttcggcgttagtggttgaggttctggggtccaactaccataaggctccgatcctgggctttgccctggccaatgaacacggtaacttcttcattcgcactgacacggctctttcttctccgctgtttaccgcgtggctggaggatgagagcaagaagaaatcagtattcgacgctaaacgcgcaatcgtggccctgaaatggaaaggcattgaattacgtggcatcgaatttgacttgttgctggcttcatatctcctgaatccctcgcaaagcacggaagatgtcgcaagcgtggccaagaccaaacagtacatggcagtacagagtgattgggcagtctatggaaaaggtgcgaaacaaacggtgccagatgaaaacgttttagccgaacatctggtgcgtaaagctgctgcaattcgcgccctggagaaagaactgatccacgatttgcaggaaaatgaacaatacgccctgtttactgaccttgaattacctctgtcctcggtcctggcagagatggaatttaccggtgtgaaagtagatgttgaacgcctgaaagaaatgggcgaggagctcacagaacaactgcgccaagtggagcaggaaatctataagttagctggccaacgcttcaacattaacagccctaaacaactgggtgtcattctgtttgaaaaattacagcttcccgtcctgaagaagacgaagaccggctatagtacgagtgctgatgtgctcgagaaacttgcccgtcagcatgaaatcgtccgcaaaattcttcactaccgtcagctcggtaaactgcaatccacatatattgaagggctgctgaaagttgtacatcgcgacacccataaagtccacaccatcttcaaccaggccctgactcaaaccgggcgcctgtcaagcaccgaacctaatctccagaacatcccaattcgtctggaagaaggccgcaaaattcgccaagcatttgtgccatcgaaacctgactgggttatctttagcgcagattactcacagattgagctccgtgttctcgcacacctggcaaacgatgaaaatctgatcgatgcttttcgtcatgaccttgacatccatacgaagacagccatggatattttccatgtaacagcagatgaagttacccccaatatgcgtcgccaagcaaaagccgtgaacttcggtattgtctatgggatctctgattacggtctgagtcagcgtcttggcatcacgcgcaaagaagccgccgaatttattcgtcgttatttcgaaagctttcccggcgttaaacagtacatggagaatattgtaaaagaagccaaacagaaaggatacgtcaccacccttttacatcgccgccgctatctgccagacatccattctcgtaatcgcaacttacgttcattcgcagaacgcacggccatgaacaccccaattcaaggatcagccgccgacatcatcaagaaggcaatgattgatttagctgatcgtctgaaacgcgagaaacttcaagctaagatgctgctccaggttcatgacgaactgattcttgaagctcctcgtgaggaagtcgagcgcctgcgtcagattgtacccgaggtcatggagaatgccatccgcttaaccgtcccactgaaagttgattatcactacggtcctacgtggtacgacgctaag

SEQ ID NO: 398 - protein, 604 aa, synthetic construct
  REGION 1..604: note = Variant of DNA polymerase
MHHHHHHGGSGMVAPQTKKEEAVLPNINYTIVEEVTEPILADRSALVVEVLGSNYHKAPILGFALANEHGNFFIRTDTALSSPLFTAWLEDESKKKSVFDAKRAIVALKWKGIELRGIEFDLLLASYLLNPSQSTEDVASVAKTKQYMAVQSDWAVYGKGAKQTVPDENVLAEHLVRKAAAIRALEKELIHDLQENEQYALFTDLELPLSSVLAEMEFTGVKVDVERLKEMGEELTEQLRQVEQEIYKLAGQRFNINSPKQLGVILFEKLQLPVLKKTKTGYSTSADVLEKLARQHEIVRKILHYRQLGKLQSTYIEGLLKVVHRDTHKVHTIFNQALTQTGRLSSTEPNLQNIPIRLEEGRKIRQAFVPSKPDWVIFSADYSQIELRVLAHLANDENLIDAFRHDLDIHTKTAMDIFHVTADEVTPNMRRQAKAVNFGIVYGISDYGLSQRLGITRKEAAEFIRRYFESFPGVKQYMENIVKEAKQKGYVTTLLHRRRYLPDIHSRNRNLRSFAERTAMNTPIQGSAADIIKKAMIDLADRLKREKLQAKMLLQVHDELILEAPREEVERLRQIVPEVMENAIRLTVPLKVDYHYGPTWYDAK

SEQ ID NO: 399 - DNA, 1812 bp, synthetic construct
  misc_feature 1..1812: note = Variant of DNA polymerase
  source 1..1812: mol_type = other DNA
atgcatcaccatcaccatcacggtggcagcggtatggttgcaccacagaccaaaaaagaagaggccgtactgccgaacatcaattatacaattgtggaggaagtcaccgaaccgattctcgcggatcgttcggcgttagtggttgaggttctggggtccaactaccataaggctccgatcctgggctttgccctggccaatgagcacggtaacttcttcattcgcactgacacggctcttcgctctccgctgtttaccgcgtggctggaggatgagagcaagaagaaatcagtattcgacgctaaacgcgcaatcgtggccctgaaatggaaaggcattgaattacgtggcatcgaatttgacttgttgctggcttcatatctcctgaatccctcgcaaagcacggaagatgtcgcaagcgtggccaagaccaaacagtacatggcagtacagagtgattgggcagtctatggaaaaggtgcgaaacaaacggtgccagatgaaaacgttttagccgaacatctggtgcgtaaagctgctgcaattcgcgccctggagaaagaactgatccacgatttgcaggaaaatgaacaatacgccctgtttactgaccttgaattacctctgtcctcggtcctggcagagatggaatttaccggtgtgaaagtagatgttgaacgcctgaaagaaatgggcgaggagctcacagaacaactgcgccaagtggagcaggaaatctataagttagctggccaacgcttcaacattaacagccctaaacaactgggtgtcattctgtttgaaaaattacagcttcccgtcctgaagaagacgaagaccggctatagtacgagtgctgatgtgctcgagaaacttgcccgtcagcatgaaatcgtccgcaaaattcttcactaccgtcagctcggtaaactgcaatccacatatattgaagggctgctgaaagttgtacatcgcgacacccataaagtccacaccatcttcaaccaggccctgactcaaaccgggcgcctgtcaagcaccgaacctaatctccagaacatcccaattcgtctggaagaaggccgcaaaattcgccaagcatttgtgccatcgaaacctgactgggttatctttagcgcagattactcacagattgagctccgtgttctcgcacacctggcaaacgatgaaaatctgatcgatgcttttcgtcatgaccttgacatccatacgaagacagccatggatattttccatgtaacagcagatgaagttacccccaatatgcgtcgccaagcaaaagccgtgaacttcggtattgtctatgggatctctgattacggtctgagtcagcgtcttggcatcacgcgcaaagaagccgccgaatttattcgtcgttatttcgaaagctttcccggcgttaaacagtacatggagaatattgtaaaagaagccaaacagaaaggatacgtcaccacccttttacaccgccgccgctatctgccagacatccattctcgtaatcgcaacttacgttcattcgcagaacgcacggccatgaacaccccaattcaaggatcagccgccgacatcatcaagaaggcaatgattgatttagctgatcgtctgaaacgcgaggtacttcaagctcgtatgctgctccaggttcatgacgaactgattcttgaagctcctcgtgaggaagtcgaacgcctggttcagattgtacccgaggtcatggagaacgccatccagttaaccgtcccactgaaagttgattatcactacggtcctacgtggtacgacgctaag

SEQ ID NO: 400 - protein, 604 aa, synthetic construct
  REGION 1..604: note = Variant of DNA polymerase
MHHHHHHGGSGMVAPQTKKEEAVLPNINYTIVEEVTEPILADRSALVVEVLGSNYHKAPILGFALANEHGNFFIRTDTALRSPLFTAWLEDESKKKSVFDAKRAIVALKWKGIELRGIEFDLLLASYLLNPSQSTEDVASVAKTKQYMAVQSDWAVYGKGAKQTVPDENVLAEHLVRKAAAIRALEKELIHDLQENEQYALFTDLELPLSSVLAEMEFTGVKVDVERLKEMGEELTEQLRQVEQEIYKLAGQRFNINSPKQLGVILFEKLQLPVLKKTKTGYSTSADVLEKLARQHEIVRKILHYRQLGKLQSTYIEGLLKVVHRDTHKVHTIFNQALTQTGRLSSTEPNLQNIPIRLEEGRKIRQAFVPSKPDWVIFSADYSQIELRVLAHLANDENLIDAFRHDLDIHTKTAMDIFHVTADEVTPNMRRQAKAVNFGIVYGISDYGLSQRLGITRKEAAEFIRRYFESFPGVKQYMENIVKEAKQKGYVTTLLHRRRYLPDIHSRNRNLRSFAERTAMNTPIQGSAADIIKKAMIDLADRLKREVLQARMLLQVHDELILEAPREEVERLVQIVPEVMENAIQLTVPLKVDYHYGPTWYDAK

SEQ ID NO: 401 - DNA, 1812 bp, synthetic construct
  misc_feature 1..1812: note = Variant of DNA polymerase
  source 1..1812: mol_type = other DNA
atgcatcaccatcaccatcacggtggcagcggtatggttgcaccacagaccaaaaaagaagaggccgtaatgcctaacatcaattatacaattgtggaggaagtcaccgaaccgattctcgcggatcgttcggcgttagtggttgaggttctggggtccaactaccataagaagccgatcctgggctttgccctggccaatgagcacggtaacttcttcattcgcactgacacggctctttcttctccgctgtttaccgcgtggctggaggatgagagcaagaagaaatcagtattcgacgctaaacgcgcaatcgtggccctgaaatggaaaggcattgaattacgtggcatcgaatttgacttgttgctggcttcatatctcctgaatccctcgcagcgtacgccggatgtcgcaagcgtggccaagaccaaacagtacatggcagtacagagtgattgggcagtctatggaaaaggtgcgaaacaaacggtgccagatgaaaacgttttagccgaacatctggtgcgtaaagctgctgcaattcgcgccctggagaaagaactgatccacgatttgcaggaaaatgaacaatacgccctgtttactgaccttgaattacctctgtcctcggtcctggcagagatggaatttaccggtgtgaaagtagatgttgaacgcctgaaagaaatgggcgaggagctcacagaacaactgcgccaagtggagcaggaaatctataagttagctggccaacgcttcaacattaacagccctaaacaactgggtgtcattctgtttgaaaaattacagcttcccgtcctgaagaagacgaagaccggctatagtacgagtgctgatgtgctcgagaaacttgcccgtcagcatgaaatcgtccgcaaaattcttcactaccgtcagctcggtaaactgcaatccacatatattgaagggctgctgaaagttgtacatcgcgacacccataaagtccacaccatcttcaaccaggccctgactcaaaccgggcgcctgtcaagcaccgaacctaatctccagaacatcccaattcgtctggaagaaggccgcaaaattcgccaagcatttgtgccatcgaaacctgactgggttatctttagcgcagattactcacagattgagctccgtgttctcgcacacctggcaaacgatgaaaatctgatcgatgcttttcgtcatgaccttgacatccatacgaagacagccatggatattttccatgtaacagcagatgaagttacccccaatatgcgtcgcctggcaaaagccgtgaacttcggtattgtctatgggatctctgattacggtctgagtcagcgtcttggcatcacgcgcaaagaagccgccgaatttattcgtcgttatttcgaaagctttcccggcgttaaacagtacatggagaatattgtaaaagaagccaaacagaaaggatacgtcaccacccttttacaccgccgccgctatctgccagacatccattctcgtaatcgcaacttacgttcattcgcagaacgcacggccatgaacaccccaattcaaggatcagccgccgacatcatcaagaaggcaatgattgatttagctgatcgtctgaaacgcgagcaccttcaagctcgtatgctgctccaggttcatgacgaactgattcttgaagctcctcgtgaggaagtcgaacgcctggttcagattgtacccgaggtcatggagaacgccatccagttaaccgtcccactgaaagttgattatcactacggtcctacgtggtacgacgctaag

SEQ ID NO: 402 - protein, 604 aa, synthetic construct
  REGION 1..604: note = Variant of DNA polymerase
MHHHHHHGGSGMVAPQTKKEEAVMPNINYTIVEEVTEPILADRSALVVEVLGSNYHKKPILGFALANEHGNFFIRTDTALSSPLFTAWLEDESKKKSVFDAKRAIVALKWKGIELRGIEFDLLLASYLLNPSQRTPDVASVAKTKQYMAVQSDWAVYGKGAKQTVPDENVLAEHLVRKAAAIRALEKELIHDLQENEQYALFTDLELPLSSVLAEMEFTGVKVDVERLKEMGEELTEQLRQVEQEIYKLAGQRFNINSPKQLGVILFEKLQLPVLKKTKTGYSTSADVLEKLARQHEIVRKILHYRQLGKLQSTYIEGLLKVVHRDTHKVHTIFNQALTQTGRLSSTEPNLQNIPIRLEEGRKIRQAFVPSKPDWVIFSADYSQIELRVLAHLANDENLIDAFRHDLDIHTKTAMDIFHVTADEVTPNMRRLAKAVNFGIVYGISDYGLSQRLGITRKEAAEFIRRYFESFPGVKQYMENIVKEAKQKGYVTTLLHRRRYLPDIHSRNRNLRSFAERTAMNTPIQGSAADIIKKAMIDLADRLKREHLQARMLLQVHDELILEAPREEVERLVQIVPEVMENAIQLTVPLKVDYHYGPTWYDAK

SEQ ID NO: 403 - DNA, 1812 bp, synthetic construct
  misc_feature 1..1812: note = Variant of DNA polymerase
  source 1..1812: mol_type = other DNA
atgcatcaccatcaccatcacggtggcagcggtatggttgcaccacagaccaaaaaagaagaggccgtactgcctaacatcaattatacaattgtggaggaagtcaccgaaccgattctcgcggatcgttcggcgttagtggttgaggttctggggtccaactaccataagaagccgatcctgggctttgccctggccaatgagcacggtaacttcttcattcgcactgacacggctctttcttctccgctgtttaccgcgtggctggaggatgagagcaagaagaaatcagtattcgacgctaaacgcgcaatcgtggccctgaaatggaaaggcattgaattacgtggcatcgaatttgacttgttgctggcttcatatctcctgaatccctcgcagcgtacgccggatgtcgcaagcgtggccaagaccaaacagtacatggcagtacagagtgattgggcagtctatggaaaaggtgcgaaacaaacggtgccagatgaaaacgttttagccgaacatctggtgcgtaaagctgctgcaattcgcgccctggagaaagaactgatccacgatttgcaggaaaatgaacaatacgccctgtttactgaccttgaattacctctgtcctcggtcctggcagagatggaatttaccggtgtgaaagtagatgttgaacgcctgaaagaaatgggcgaggagctcacagaacaactgcgccaagtggagcaggaaatctataagttagctggccaacgcttcaacattaacagccctaaacaactgggtgtcattctgtttgaaaaattacagcttcccgtcctgaagaagacgaagaccggctatagtacgagtgctgatgtgctcgagaaacttgcccgtcagcatgaaatcgtccgcaaaattcttcactaccgtcagctcggtaaactgcaatccacatatattgaagggctgctgaaagttgtacatcgcgacacccataaagtccacaccatcttcaaccaggccctgactcaaaccgggcgcctgtcaagcaccgaacctaatctccagaacatcccaattcgtctggaagaaggccgcaaaattcgccaagcatttgtgccatcgaaacctgactgggttatctttagcgcagattactcacagattgagctccgtgttctcgcacacctggcaaacgatgaaaatctgatcgatgcttttcgtcatgaccttgacatccatacgaagacagccatggatattttccatgtaacagcagatgaagttacccccaatatgcgtcgcctggcaaaagccgtgaacttcggtattgtctatgggatctctgattacggtctgagtcagcgtcttggcatcacgcgcaaagaagccgccgaatttattcgtcgttatttcgaaagctttcccggcgttaaacagtacatggagaatattgtaaaagaagccaaacagaaaggatacgtcaccacccttttacaccgccgccgctatctgccagacatccattctcgtaatcgcaacttacgttcattcgcagaacgcacggccatgaacaccccaattcaaggatcagccgccgacatcatcaagaaggcaatgattgatttagctgatcgtctgaaacgcgagcaccttcaagctcgtatgctgctccaggttcatgacgaactgattcttgaagctcctcgtgaggaagtcgaacgcctggttcaggttgtacccgaggtcatggagaacgccatccagttaaccgtcccactgaaagttgattatcactacggtcctacgtggtacgacgctaag

SEQ ID NO: 404 - protein, 604 aa, synthetic construct
  REGION 1..604: note = Variant of DNA polymerase
MHHHHHHGGSGMVAPQTKKEEAVLPNINYTIVEEVTEPILADRSALVVEVLGSNYHKKPILGFALANEHGNFFIRTDTALSSPLFTAWLEDESKKKSVFDAKRAIVALKWKGIELRGIEFDLLLASYLLNPSQRTPDVASVAKTKQYMAVQSDWAVYGKGAKQTVPDENVLAEHLVRKAAAIRALEKELIHDLQENEQYALFTDLELPLSSVLAEMEFTGVKVDVERLKEMGEELTEQLRQVEQEIYKLAGQRFNINSPKQLGVILFEKLQLPVLKKTKTGYSTSADVLEKLARQHEIVRKILHYRQLGKLQSTYIEGLLKVVHRDTHKVHTIFNQALTQTGRLSSTEPNLQNIPIRLEEGRKIRQAFVPSKPDWVIFSADYSQIELRVLAHLANDENLIDAFRHDLDIHTKTAMDIFHVTADEVTPNMRRLAKAVNFGIVYGISDYGLSQRLGITRKEAAEFIRRYFESFPGVKQYMENIVKEAKQKGYVTTLLHRRRYLPDIHSRNRNLRSFAERTAMNTPIQGSAADIIKKAMIDLADRLKREHLQARMLLQVHDELILEAPREEVERLVQVVPEVMENAIQLTVPLKVDYHYGPTWYDAK

SEQ ID NO: 405 - DNA, 1812 bp, synthetic construct
  misc_feature 1..1812: note = Variant of DNA polymerase
  source 1..1812: mol_type = other DNA
atgcatcaccatcaccatcacggtggcagcggtatggttgcaccacagaccaaaaaagaagaggccgtactgccgaacatcaattatacaattgtggaggaagtcaccgaaccgattctcgcggatcgttcggcgttagtggttgaggttctggggtccaactaccataagaagccgatcctgggctttgccctggccaatgagcacggtaacttcttcattcgcactgacacggctctttcttctccgctgtttaccgcgtggctggaggatgagagcaagaagaaatcagtattcgacgctaaacgcgcaatcgtggccctgaaatggaaaggcattgaataccgtggcatcgaatttgacttgttgctggcttcatatctcctgaatccctcgcagcgtacgccggatgtcgcaagcgtggccaagaccaaacagtacatggcagtacagagtgattgggcagtctatggaaaaggtgcgaaacaaacggtgccagatgaaaacgttttagccgaacatctggtgcgtaaagctgctgcaattcgcgccctggagaaagaactgatccacgatttgcaggaaaatgaacaatacgccctgtttactgaccttgaattacctctgtcctcggtcctggcagagatggaatttaccggtgtgaaagtagatgttgaacgcctgaaagaaatgggcgaggagctcacagaacaactgcgccaagtggagcaggaaatctataagttagctggccaacgcttcaacattaacagccctaaacaactgggtgtcattctgtttgaaaaattacagcttcccgtcctgaagaagacgaagaccggctatagtacgagtgctgatgtgctcgagaaacttgcccgtcagcatgaaatcgtccgcaaaattcttcactaccgtcagctcggtaaactgcaatccacatatattgaagggctgctgaaagttgtacatcgcgacacccataaagtccacaccatcttcaaccaggccctgactcaaaccgggcgcctgtcaagcaccgaacctaatctccagaacatcccaattcgtctggaagaaggccgcaaaattcgccaagcatttgtgccatcgaaacctgactgggttatctttagcgcagattactcacagattgagctccgtgttctcgcacacctggcaaacgatgaaaatctgatcgatgcttttcgtcatgaccttgacatccatacgaagacagccatggatattttccatgtaacagcagatgaagttacccccaatatgcgtcgcctggcaaaagccgtgaacttcggtattgtctatgggatctctgattacggtctgagtcagcgtcttggcatcacgcgcaaagaagccgccgaatttattcgtcgttatttcgaaagctttcccggcgttaaacagtacatggagaatattgtaaaagaagccaaacagaaaggatacgtcaccacccttttacaccgccgccgctatctgccagacatccattctcgtaatcgcaacttacgttcattcgcagaacgcacggccatgaacaccccaattcaaggatcagccgccgacatcatcaagaaggcaatgattgatttagctgatcgtctgaaacgcgagcaccttcaagctcgtatgctgctccaggttcatgacgaactgattcttgaagctcctcgtgaggaagtcgaacgcctggttcaggttgtacccgaggtcatggagaacgccatccagttaaccgtcccactgaaagttgattatcactacggtcctacgtggtacgacgctaag

SEQ ID NO: 406 - protein, 604 aa, synthetic construct
  REGION 1..604: note = Variant of DNA polymerase
MHHHHHHGGSGMVAPQTKKEEAVLPNINYTIVEEVTEPILADRSALVVEVLGSNYHKKPILGFALANEHGNFFIRTDTALSSPLFTAWLEDESKKKSVFDAKRAIVALKWKGIEYRGIEFDLLLASYLLNPSQRTPDVASVAKTKQYMAVQSDWAVYGKGAKQTVPDENVLAEHLVRKAAAIRALEKELIHDLQENEQYALFTDLELPLSSVLAEMEFTGVKVDVERLKEMGEELTEQLRQVEQEIYKLAGQRFNINSPKQLGVILFEKLQLPVLKKTKTGYSTSADVLEKLARQHEIVRKILHYRQLGKLQSTYIEGLLKVVHRDTHKVHTIFNQALTQTGRLSSTEPNLQNIPIRLEEGRKIRQAFVPSKPDWVIFSADYSQIELRVLAHLANDENLIDAFRHDLDIHTKTAMDIFHVTADEVTPNMRRLAKAVNFGIVYGISDYGLSQRLGITRKEAAEFIRRYFESFPGVKQYMENIVKEAKQKGYVTTLLHRRRYLPDIHSRNRNLRSFAERTAMNTPIQGSAADIIKKAMIDLADRLKREHLQARMLLQVHDELILEAPREEVERLVQVVPEVMENAIQLTVPLKVDYHYGPTWYDAK

SEQ ID NO: 407 - DNA, 1812 bp, synthetic construct
  misc_feature 1..1812: note = Variant of DNA polymerase
  source 1..1812: mol_type = other DNA
atgcatcaccatcaccatcacggtggcagcggtatggttgcaccacagaccaaaaaagaagaggccgtaatgcctaacatcaattatacaattgtggaggaagtcaccgaaccgattctcgcggatcgttcggcgttagtggttgaggttctggggtccaactaccataaggctccgatcctgggctttgccctggccaatgagcacggtaacttcttcattcgcactgacacggctctttcttctccgctgtttaccgcgtggctggaggatgagagcaagaagaaatcagtattcgacgctaaacgcgcaatcgtggccctgaaatggaaaggcattgaataccgtggcatcgaatttgacttgttgctggcttcatatctcctgaatccctcgcagcgtacgccggatgtcgcaagcgtggccaagaccaaacagtacatggcagtacagagtgattgggcagtctatggaaaaggtgcgaaacaaacggtgccagatgaaaacgttttagccgaacatctggtgcgtaaagctgctgcaattcgcgccctggagaaagaactgatccacgatttgcaggaaaatgaacaatacgccctgtttactgaccttgaattacctctgtcctcggtcctggcagagatggaatttaccggtgtgaaagtagatgttgaacgcctgaaagaaatgggcgaggagctcacagaacaactgcgccaagtggagcaggaaatctataagttagctggccaacgcttcaacattaacagccctaaacaactgggtgtcattctgtttgaaaaattacagcttcccgtcctgaagaagacgaagaccggctatagtacgagtgctgatgtgctcgagaaacttgcccgtcagcatgaaatcgtccgcaaaattcttcactaccgtcagctcggtaaactgcaatccacatatattgaagggctgctgaaagttgtacatcgcgacacccataaagtccacaccatcttcaaccaggccctgactcaaaccgggcgcctgtcaagcaccgaacctaatctccagaacatcccaattcgtctggaagaaggccgcaaaattcgccaagcatttgtgccatcgaaacctgactgggttatctttagcgcagattactcacagattgagctccgtgttctcgcacacctggcaaacgatgaaaatctgatcgatgcttttcgtcatgaccttgacatccatacgaagacagccatggatattttccatgtaacagcagatgaagttacccccaatatgcgtcgcctggcaaaagccgtgaacttcggtattgtctatgggatctctgattacggtctgagtcagcgtcttggcatcacgcgcaaagaagccgccgaatttattcgtcgttatttcgaaagctttcccggcgttaaacagtacatggagaatattgtaaaagaagccaaacagaaaggatacgtcaccacccttttacaccgccgccgctatctgccagacatccattctcgtaatcgcaacttacgttcattcgcagaacgcacggccatgaacaccccaattcaaggatcagccgccgacatcatcaagaaggcaatgattgatttagctgatcgtctgaaacgcgagcaccttcaagctcgtatgctgctccaggttcatgacgaactgattcttgaagctcctcgtgaggaagtcgaacgcctggttcaggttgtacccgaggtcatggagaacgccatccagttaaccgtcccactgaaagttgattatcactacggtcctacgtggtacgacgctaag

SEQ ID NO: 408 - protein, 604 aa, synthetic construct
  REGION 1..604: note = Variant of DNA polymerase
MHHHHHHGGSGMVAPQTKKEEAVMPNINYTIVEEVTEPILADRSALVVEVLGSNYHKAPILGFALANEHGNFFIRTDTALSSPLFTAWLEDESKKKSVFDAKRAIVALKWKGIEYRGIEFDLLLASYLLNPSQRTPDVASVAKTKQYMAVQSDWAVYGKGAKQTVPDENVLAEHLVRKAAAIRALEKELIHDLQENEQYALFTDLELPLSSVLAEMEFTGVKVDVERLKEMGEELTEQLRQVEQEIYKLAGQRFNINSPKQLGVILFEKLQLPVLKKTKTGYSTSADVLEKLARQHEIVRKILHYRQLGKLQSTYIEGLLKVVHRDTHKVHTIFNQALTQTGRLSSTEPNLQNIPIRLEEGRKIRQAFVPSKPDWVIFSADYSQIELRVLAHLANDENLIDAFRHDLDIHTKTAMDIFHVTADEVTPNMRRLAKAVNFGIVYGISDYGLSQRLGITRKEAAEFIRRYFESFPGVKQYMENIVKEAKQKGYVTTLLHRRRYLPDIHSRNRNLRSFAERTAMNTPIQGSAADIIKKAMIDLADRLKREHLQARMLLQVHDELILEAPREEVERLVQVVPEVMENAIQLTVPLKVDYHYGPTWYDAK

SEQ ID NO: 409 - DNA, 1812 bp, synthetic construct
  misc_feature 1..1812: note = Variant of DNA polymerase
  source 1..1812: mol_type = other DNA
atgcatcaccatcaccatcacggtggcagcggtatggttgcaccacagaccaaaaaagaagaggccgtaatgctgaacatcaattatacaattgtggaggaagtcaccgaaccgattctcgcggatcgttcggcgttagtggttgaggttctggggtccaactaccataaggctccgatcctgggctttgccctggccaatgagcacggtaacttcttcattcgcactgacacggctctttcttctccgctgtttaccgcgtggctggaggatgagagcaagaagaaatcagtattcgacgctaaacgcgcaatcgtggccctgaaatggaaaggcattgaattacgtggcatcgaatttgacttgttgctggcttcatatctcctgaatccctcgcagcgtacgccggatgtcgcaagcgtggccaagaccaaacagtacatggcagtacagagtgattgggcagtctatggaaaaggtgcgaaacaaacggtgccagatgaaaacgttttagccgaacatctggtgcgtaaagctgctgcaattcgcgccctggagaaagaactgatccacgatttgcaggaaaatgaacaatacgccctgtttactgaccttgaattacctctgtcctcggtcctggcagagatggaatttaccggtatgaaagtagatgttgaacgcctgaaagaaatgggcgaggagctcacagaacaactgcgccaagtggagcaggaaatctataagttagctggccaacgcttcaacattaacagccctaaacaactgggtgtcattctgtttgaaaaattacagcttcccgtcctgaagaagacgaagaccggctatagtacgagtgctgatgtgctcgagaaacttgcccgtcagcatgaaatcgtccgcaaaattcttcactaccgtcagctcggtaaactgcaatccacatatattgaagggctgctgaaagttgtacatcgcgacacccataaagtccacaccatcttcaaccaggccctgactcaaaccgggcgcctgtcaagcaccgaacctaatctccagaacatcccaattcgtctggaagaaggccgcaaaattcgccaagcatttgtgccatcgaaacctgactgggttatctttagcgcagattactcacagattgagctccgtgttctcgcacacctggcaaacgatgaaaatctgatcgatgcttttcgtcatgaccttgacatccatacgaagacagccatggatattttccatgtaacagcagatgaagttacccccaatatgcgtcgcctggcaaaagccgtgaacttcggtattgtctatgggatctctgattacggtctgagtcagcgtcttggcatcacgcgcaaagaagccgccgaatttattcgtcgttatttcgaaagctttcccggcgttaaacagtacatggagaatattgtaaaagaagccaaacagaaaggatacgtcaccacccttttacaccgccgccgctatctgccagacatccattctcgtaatcgcaacttacgttcattcgcagaacgcacggccatgaacaccccaattcaaggatcagccgccgacatcatcaagaaggcaatgattgatttagctgatcgtctgaaacgcgagcaccttcaagctcgtatgctgctccaggttcatgacgaactgattcttgaagctcctcgtgaggaagtcgaacgcctggttcagattgtacccgaggtcatggagaacgccatccagttaaccgtcccactgaaagttgattatcactacggtcctacgtggtacgacgctaag

SEQ ID NO: 410 - protein, 604 aa, synthetic construct
  REGION 1..604: note = Variant of DNA polymerase
MHHHHHHGGSGMVAPQTKKEEAVMLNINYTIVEEVTEPILADRSALVVEVLGSNYHKAPILGFALANEHGNFFIRTDTALSSPLFTAWLEDESKKKSVFDAKRAIVALKWKGIELRGIEFDLLLASYLLNPSQRTPDVASVAKTKQYMAVQSDWAVYGKGAKQTVPDENVLAEHLVRKAAAIRALEKELIHDLQENEQYALFTDLELPLSSVLAEMEFTGMKVDVERLKEMGEELTEQLRQVEQEIYKLAGQRFNINSPKQLGVILFEKLQLPVLKKTKTGYSTSADVLEKLARQHEIVRKILHYRQLGKLQSTYIEGLLKVVHRDTHKVHTIFNQALTQTGRLSSTEPNLQNIPIRLEEGRKIRQAFVPSKPDWVIFSADYSQIELRVLAHLANDENLIDAFRHDLDIHTKTAMDIFHVTADEVTPNMRRLAKAVNFGIVYGISDYGLSQRLGITRKEAAEFIRRYFESFPGVKQYMENIVKEAKQKGYVTTLLHRRRYLPDIHSRNRNLRSFAERTAMNTPIQGSAADIIKKAMIDLADRLKREHLQARMLLQVHDELILEAPREEVERLVQIVPEVMENAIQLTVPLKVDYHYGPTWYDAK

SEQ ID NO: 411 - DNA, 1812 bp, synthetic construct
  misc_feature 1..1812: note = Variant of DNA polymerase
  source 1..1812: mol_type = other DNA
atgcatcaccatcaccatcacggtggcagcggtatggttgcaccacagaccaaaaaagaagaggccgtactgctgaacatcaattatacaattgtggaggaagtcaccgaaccgattctcgcggatcgttcggcgttagtggttgaggttctggggtccaactaccataagaagccgatcctgggctttgccctggccaatgagcacggtaacttcttcattcgcactgacacggctctttcttctccgctgtttaccgcgtggctggaggatgagagcaagaagaaatcagtattcgacgctaaacgcgcaatcgtggccctgaaatggaaaggcattgaattacgtggcatcgaatttgacttgttgctggcttcatatctcctgaatccctcgcagcgtacgccggatgtcgcaagcgtggccaagaccaaacagtacatggcagtacagagtgattgggcagtctatggaaaaggtgcgaaacaaacggtgccagatgaaaacgttttagccgaacatctggtgcgtaaagctgctgcaattcgcgccctggagaaagaactgatccacgatttgcaggaaaatgaacaatacgccctgtttactgaccttgaattacctctgtcctcggtcctggcagagatggaatttaccggtgtgaaagtagatgttgaacgcctgaaagaaatgggcgaggagctcacagaacaactgcgccaagtggagcaggaaatctataagttagctggccaacgcttcaacattaacagccctaaacaactgggtgtcattctgtttgaaaaattacagcttcccgtcctgaagaagacgaagaccggctatagtacgagtgctgatgtgctcgagaaacttgcccgtcagcatgaaatcgtccgcaaaattcttcactaccgtcagctcggtaaactgcaatccacatatattgaagggctgctgaaagttgtacatcgcgacacccataaagtccacaccatcttcaaccaggccctgactcaaaccgggcgcctgtcaagcaccgaacctaatctccagaacatcccaattcgtctggaagaaggccgcaaaattcgccaagcatttgtgccatcgaaacctgactgggttatctttagcgcagattactcacagattgagctccgtgttctcgcacacctggcaaacgatgaaaatctgatcgatgcttttcgtcatgaccttgacatccatacgaagacagccatggatattttccatgtaacagcagatgaagttacccccaatatgcgtcgcctggcaaaagccgtgaacttcggtattgtctatgggatctctgattacggtctgagtcagcgtcttggcatcacgcgcaaagaagccgccgaatttattcgtcgttatttcgaaagctttcccggcgttaaacagtacatggagaatattgtaaaagaagccaaacagaaaggatacgtcaccacccttttacaccgccgccgctatctgccagacatccattctcgtaatcgcaacttacgttcattcgcagaacgcacggccatgaacaccccaattcaaggatcagccgccgacatcatcaagaaggcaatgattgatttagctgatcgtctgaaacgcgagcaccttcaagctcgtatgctgctccaggttcatgacgaactgattcttgaagctcctcgtgaggaagtcgaacgcctggttcaggttgtacccgaggtcatggagaacgccatccagttaaccgtcccactgaaagttgattatcactacggtcctacgtggtacgacgctaag

SEQ ID NO: 412 - protein, 604 aa, synthetic construct
  REGION 1..604: note = Variant of DNA polymerase
MHHHHHHGGSGMVAPQTKKEEAVLLNINYTIVEEVTEPILADRSALVVEVLGSNYHKKPILGFALANEHGNFFIRTDTALSSPLFTAWLEDESKKKSVFDAKRAIVALKWKGIELRGIEFDLLLASYLLNPSQRTPDVASVAKTKQYMAVQSDWAVYGKGAKQTVPDENVLAEHLVRKAAAIRALEKELIHDLQENEQYALFTDLELPLSSVLAEMEFTGVKVDVERLKEMGEELTEQLRQVEQEIYKLAGQRFNINSPKQLGVILFEKLQLPVLKKTKTGYSTSADVLEKLARQHEIVRKILHYRQLGKLQSTYIEGLLKVVHRDTHKVHTIFNQALTQTGRLSSTEPNLQNIPIRLEEGRKIRQAFVPSKPDWVIFSADYSQIELRVLAHLANDENLIDAFRHDLDIHTKTAMDIFHVTADEVTPNMRRLAKAVNFGIVYGISDYGLSQRLGITRKEAAEFIRRYFESFPGVKQYMENIVKEAKQKGYVTTLLHRRRYLPDIHSRNRNLRSFAERTAMNTPIQGSAADIIKKAMIDLADRLKREHLQARMLLQVHDELILEAPREEVERLVQVVPEVMENAIQLTVPLKVDYHYGPTWYDAK

SEQ ID NO: 413 - DNA, 1812 bp, synthetic construct
  misc_feature 1..1812: note = Variant of DNA polymerase
  source 1..1812: mol_type = other DNA
atgcatcaccatcaccatcacggtggcagcggtatggttgcaccacagaccaaaaaagaagaggccgtaatgatgaacatcaattatacaattgtggaggaagtcaccgaaccgattctcgcggatcgttcggcgttagtggttgaggttctggggtccaactaccataagaagccgatcctgggctttgccctggccaatgagcacggtaacttcttcattcgcactgacacggctctttcttctccgctgtttaccgcgtggctggaggatgagagcaagaagaaatcagtattcgacgctaaacgcgcaatcgtggccctgaaatggaaaggcattgaattacgtggcatcgaatttgacttgttgctggcttcatatctcctgaatccctcgcagcgtacgccggatgtcgcaagcgtggccaagaccaaacagtacatggcagtacagagtgattgggcagtctatggaaaaggtgcgaaacaaacggtgccagatgaaaacgttttagccgaacatctggtgcgtaaagctgctgcaattcgcgccctggagaaagaactgatccacgatttgcaggaaaatgaacaatacgccctgtttactgaccttgaattacctctgtcctcggtcctggcagagatggaatttaccggtgtgaaagtagatgttgaacgcctgaaagaaatgggcgaggagctcacagaacaactgcgccaagtggagcaggaaatctataagttagctggccaacgcttcaacattaacagccctaaacaactgggtgtcattctgtttgaaaaattacagcttcccgtcctgaagaagacgaagaccggctatagtacgagtgctgatgtgctcgagaaacttgcccgtcagcatgaaatcgtccgcaaaattcttcactaccgtcagctcggtaaactgcaatccacatatattgaagggctgctgaaagttgtacatcgcgacacccataaagtccacaccatcttcaaccaggccctgactcaaaccgggcgcctgtcaagcaccgaacctaatctccagaacatcccaattcgtctggaagaaggccgcaaaattcgccaagcatttgtgccatcgaaacctgactgggttatctttagcgcagattactcacagattgagctccgtgttctcgcacacctggcaaacgatgaaaatctgatcgatgcttttcgtcatgaccttgacatccatacgaagacagccatggatattttccatgtaacagcagatgaagttacccccaatatgcgtcgcctggcaaaagccgtgaacttcggtattgtctatgggatctctgattacggtctgagtcagcgtcttggcatcacgcgcaaagaagccgccgaatttattcgtcgttatttcgaaagctttcccggcgttaaacagtacatggagaatattgtaaaagaagccaaacagaaaggatacgtcaccacccttttacaccgccgccgctatctgccagacatccattctcgtaatcgcaacttacgttcattcgcagaacgcacggccatgaacaccccaattcaaggatcagccgccgacatcatcaagaaggcaatgattgatttagctgatcgtctgaaacgcgagcaccttcaagctcgtatgctgctccaggttcatgacgaactgattcttgaagctcctcgtgaggaagtcgaacgcctggttcaggttgtacccgaggtcatggagaacgccatccagttaaccgtcccactgaaagttgattatcactacggtcctacgtggtacgacgctaag

SEQ ID NO: 414 - protein, 604 aa, synthetic construct
  REGION 1..604: note = Variant of DNA polymerase
MHHHHHHGGSGMVAPQTKKEEAVMMNINYTIVEEVTEPILADRSALVVEVLGSNYHKKPILGFALANEHGNFFIRTDTALSSPLFTAWLEDESKKKSVFDAKRAIVALKWKGIELRGIEFDLLLASYLLNPSQRTPDVASVAKTKQYMAVQSDWAVYGKGAKQTVPDENVLAEHLVRKAAAIRALEKELIHDLQENEQYALFTDLELPLSSVLAEMEFTGVKVDVERLKEMGEELTEQLRQVEQEIYKLAGQRFNINSPKQLGVILFEKLQLPVLKKTKTGYSTSADVLEKLARQHEIVRKILHYRQLGKLQSTYIEGLLKVVHRDTHKVHTIFNQALTQTGRLSSTEPNLQNIPIRLEEGRKIRQAFVPSKPDWVIFSADYSQIELRVLAHLANDENLIDAFRHDLDIHTKTAMDIFHVTADEVTPNMRRLAKAVNFGIVYGISDYGLSQRLGITRKEAAEFIRRYFESFPGVKQYMENIVKEAKQKGYVTTLLHRRRYLPDIHSRNRNLRSFAERTAMNTPIQGSAADIIKKAMIDLADRLKREHLQARMLLQVHDELILEAPREEVERLVQVVPEVMENAIQLTVPLKVDYHYGPTWYDAK

SEQ ID NO: 415 - DNA, 1812 bp, synthetic construct
  misc_feature 1..1812: note = Variant of DNA polymerase
  source 1..1812: mol_type = other DNA
atgcatcaccatcaccatcacggtggcagcggtatggttgcaccacagaccaaaaaagaagaggccgtactgccgaacatcaattatacaattgtggaggaagtcaccgaaccgattctcgcggatcgttcggcgttagtggttgaggttctggggtccaactaccataaggctccgatcctgggctttgccctggccaatgagcacggtaacttcttcattcgcactgacacggctctttcttctccgctgtttaccgcgtggctggaggatgagagcaagaagaaatcagtattcgacgctaaacgcgcaatcgtggccctgaaatggaaaggcattgaattacgtggcatcgaatttgacttgttgctggcttcatatctcctgaatccctcgcagcgtacgccggatgtcgcaagcgtggccaagaccaaacagtacatggcagtacagagtgattgggcagtctatggaaaaggtgcgaaacaaacggtgccagatgaaaacgttttagccgaacatctggtgcgtaaagctgctgcaattcgcgccctggagaaagaactgatccacgatttgcaggaaaatgaacaatacgccctgtttactgaccttgaattacctctgtcctcggtcctggcagagatggaatttaccggtatgaaagtagatgttgaacgcctgaaagaaatgggcgaggagctcacagaacaactgcgccaagtggagcaggaaatctataagttagctggccaacgcttcaacattaacagccctaaacaactgggtgtcattctgtttgaaaaattacagcttcccgtcctgaagaagacgaagaccggctatagtacgagtgctgatgtgctcgagaaacttgcccgtcagcatgaaatcgtccgcaaaattcttcactaccgtcagctcggtaaactgcaatccacatatattgaagggctgctgaaagttgtacatcgcgacacccataaagtccacaccatcttcaaccaggccctgactcaaaccgggcgcctgtcaagcaccgaacctaatctccagaacatcccaattcgtctggaagaaggccgcaaaattcgccaagcatttgtgccatcgaaacctgactgggttatctttagcgcagattactcacagattgagctccgtgttctcgcacacctggcaaacgatgaaaatctgatcgatgcttttcgtcatgaccttgacatccatacgaagacagccatggatattttccatgtaacagcagatgaagttacccccaatatgcgtcgcctggcaaaagccgtgaacttcggtattgtctatgggatctctgattacggtctgagtcagcgtcttggcatcacgcgcaaagaagccgccgaatttattcgtcgttatttcgaaagctttcccggcgttaaacagtacatggagaatattgtaaaagaagccaaacagaaaggatacgtcaccacccttttacaccgccgccgctatctgccagacatccattctcgtaatcgcaacttacgttcattcgcagaacgcacggccatgaacaccccaattcaaggatcagccgccgacatcatcaagaaggcaatgattgatttagctgatcgtctgaaacgcgagcaccttcaagctcgtatgctgctccaggttcatgacgaactgattcttgaagctcctcgtgaggaagtcgaacgcctggttcaggttgtacccgaggtcatggagaacgccatccagttaaccgtcccactgaaagttgattatcactacggtcctacgtggtacgacgctaag

SEQ ID NO: 416 - protein, 604 aa, synthetic construct
  REGION 1..604: note = Variant of DNA polymerase
MHHHHHHGGSGMVAPQTKKEEAVLPNINYTIVEEVTEPILADRSALVVEVLGSNYHKAPILGFALANEHGNFFIRTDTALSSPLFTAWLEDESKKKSVFDAKRAIVALKWKGIELRGIEFDLLLASYLLNPSQRTPDVASVAKTKQYMAVQSDWAVYGKGAKQTVPDENVLAEHLVRKAAAIRALEKELIHDLQENEQYALFTDLELPLSSVLAEMEFTGMKVDVERLKEMGEELTEQLRQVEQEIYKLAGQRFNINSPKQLGVILFEKLQLPVLKKTKTGYSTSADVLEKLARQHEIVRKILHYRQLGKLQSTYIEGLLKVVHRDTHKVHTIFNQALTQTGRLSSTEPNLQNIPIRLEEGRKIRQAFVPSKPDWVIFSADYSQIELRVLAHLANDENLIDAFRHDLDIHTKTAMDIFHVTADEVTPNMRRLAKAVNFGIVYGISDYGLSQRLGITRKEAAEFIRRYFESFPGVKQYMENIVKEAKQKGYVTTLLHRRRYLPDIHSRNRNLRSFAERTAMNTPIQGSAADIIKKAMIDLADRLKREHLQARMLLQVHDELILEAPREEVERLVQVVPEVMENAIQLTVPLKVDYHYGPTWYDAK

SEQ ID NO: 417 - DNA, 1812 bp, synthetic construct
  misc_feature 1..1812: note = Variant of DNA polymerase
  source 1..1812: mol_type = other DNA
atgcatcaccatcaccatcacggtggcagcggtatggttgcaccacagaccaaaaaagaagaggccgtactgccgaacatcaattatacaattgtggaggaagtcaccgaaccgattctcgcggatcgttcggcgttagtggttgaggttctggggtccaactaccataaggctccgatcctgggctttgccctggccaatgagcacggtaacttcttcattcgcactgacacggctctttcttctccgctgtttaccgcgtggctggaggatgagagcaagaagaaatcagtattcgacgctaaacgcgcaatcgtggccctgaaatggaaaggcattgaattacgtggcatcgaatttgacttgttgctggcttcatatctcctgaatccctcgcagcgtacgccggatgtcgcaagcgtggccaagaccaaacagtacatggcagtacagagtgattgggcagtctatggaaaaggtgcgaaacaaacggtgccagatgaaaacgttttagccgaacatctggtgcgtaaagctgctgcaattcgcgccctggagaaagaactgatccacgatttgcaggaaaatgaacaatacgccctgtttactgaccttgaattacctctgtcctcggtcctggcagagatggaatttaccggtgtgaaagtagatgttgaacgcctgaaagaaatgggcgaggagctcacagaacaactgcgccaagtggagcaggaaatctataagttagctggccaacgcttcaacattaacagccctaaacaactgggtgtcattctgtttgaaaaattacagcttcccgtcctgaagaagacgaagaccggctatagtacgagtgctgatgtgctcgagaaacttgcccgtcagcatgaaatcgtccgcaaaattcttcactaccgtcagctcggtaaactgcaatccacatatattgaagggctgctgaaagttgtacatcgcgacacccataaagtccacaccatcttcaaccaggccctgactcaaaccgggcgcctgtcaagcaccgaacctaatctccagaacatcccaattcgtctggaagaaggccgcaaaattcgccaagcatttgtgccatcgaaacctgactgggttatctttagcgcagattactcacagattgagctccgtgttctcgcacacctggcaaacgatgaaaatctgatcgatgcttttcgtcatgaccttgacatccatacgaagacagccatggatattttccatgtaacagcagatgaagttacccccaatatgcgtcgcctggcaaaagccgtgaacttcggtattgtctatgggatctctgattacggtctgagtcagcgtcttggcatcacgcgcaaagaagccgccgaatttattcgtcgttatttcgaaagctttcccggcgttaaacagtacatggagaatattgtaaaagaagccaaacagaaaggatacgtcaccacccttttacaccgccgccgctatctgccagacatccattctcgtaatcgcaacttacgttcattcgcagaacgcacggccatgaacaccccaattcaaggatcagccgccgacatcatcaagaaggcaatgattgatttagctgatcgtctgaaacgcgagcaccttcaagctcgtatgctgctccaggttcatgacgaactgattcttgaagctcctcgtgaggaagtcgaacgcctggttcaggttgtacccgaggtcatggagaacgccatccagttaaccgtcccactgaaagttgattatcactacggtcctacgtggtacgacgctaag

SEQ ID NO: 418 - protein, 604 aa, synthetic construct
  REGION 1..604: note = Variant of DNA polymerase
MHHHHHHGGSGMVAPQTKKEEAVLPNINYTIVEEVTEPILADRSALVVEVLGSNYHKAPILGFALANEHGNFFIRTDTALSSPLFTAWLEDESKKKSVFDAKRAIVALKWKGIELRGIEFDLLLASYLLNPSQRTPDVASVAKTKQYMAVQSDWAVYGKGAKQTVPDENVLAEHLVRKAAAIRALEKELIHDLQENEQYALFTDLELPLSSVLAEMEFTGVKVDVERLKEMGEELTEQLRQVEQEIYKLAGQRFNINSPKQLGVILFEKLQLPVLKKTKTGYSTSADVLEKLARQHEIVRKILHYRQLGKLQSTYIEGLLKVVHRDTHKVHTIFNQALTQTGRLSSTEPNLQNIPIRLEEGRKIRQAFVPSKPDWVIFSADYSQIELRVLAHLANDENLIDAFRHDLDIHTKTAMDIFHVTADEVTPNMRRLAKAVNFGIVYGISDYGLSQRLGITRKEAAEFIRRYFESFPGVKQYMENIVKEAKQKGYVTTLLHRRRYLPDIHSRNRNLRSFAERTAMNTPIQGSAADIIKKAMIDLADRLKREHLQARMLLQVHDELILEAPREEVERLVQVVPEVMENAIQLTVPLKVDYHYGPTWYDAK

SEQ ID NO: 419 - DNA, 1812 bp, synthetic construct
  misc_feature 1..1812: note = Variant of DNA polymerase
  source 1..1812: mol_type = other DNA
atgcatcaccatcaccatcacggtggcagcggtatggttgcaccacagaccaaaaaagaagaggccgtaatgcctaacatcaattatacaattgtggaggaagtcaccgaaccgattctcgcggatcgttcggcgttagtggttgaggttctggggtccaactaccataaggctccgatcctgggctttgccctggccaatgagcacggtaacttcttcattcgcactgacacggctctttcttctccgctgtttaccgcgtggctggaggatgagagcaagaagaaatcagtattcgacgctaaacgcgcaatcgtggccctgaaatggaaaggcattgaactgcgtggcatcgaatttgacttgttgctggcttcatatctcctgaatccctcgcagcgtacgccggatgtcgcaagcgtggccaagaccaaacagtacatggcagtacagagtgattgggcagtctatggaaaaggtgcgaaacaaacggtgccagatgaaaacgttttagccgaacatctggtgcgtaaagctgctgcaattcgcgccctggagaaagaactgatccacgatttgcaggaaaatgaacaatacgccctgtttactgaccttgaattacctctgtcctcggtcctggcagagatggaatttaccggtatgaaagtagatgttgaacgcctgaaagaaatgggcgaggagctcacagaacaactgcgccaagtggagcaggaaatctataagttagctggccaacgcttcaacattaacagccctaaacaactgggtgtcattctgtttgaaaaattacagcttcccgtcctgaagaagacgaagaccggctatagtacgagtgctgatgtgctcgagaaacttgcccgtcagcatgaaatcgtccgcaaaattcttcactaccgtcagctcggtaaactgcaatccacatatattgaagggctgctgaaagttgtacatcgcgacacccataaagtccacaccatcttcaaccaggccctgactcaaaccgggcgcctgtcaagcaccgaacctaatctccagaacatcccaattcgtctggaagaaggccgcaaaattcgccaagcatttgtgccatcgaaacctgactgggttatctttagcgcagattactcacagattgagctccgtgttctcgcacacctggcaaacgatgaaaatctgatcgatgcttttcgtcatgaccttgacatccatacgaagacagccatggatattttccatgtaacagcagatgaagttacccccaatatgcgtcgcctggcaaaagccgtgaacttcggtattgtctatgggatctctgattacggtctgagtcagcgtcttggcatcacgcgcaaagaagccgccgaatttattcgtcgttatttcgaaagctttcccggcgttaaacagtacatggagaatattgtaaaagaagccaaacagaaaggatacgtcaccacccttttacaccgccgccgctatctgccagacatccattctcgtaatcgcaacttacgttcattcgcagaacgcacggccatgaacaccccaattcaaggatcagccgccgacatcatcaagaaggcaatgattgatttagctgatcgtctgaaacgcgagcaccttcaagctcgtatgctgctccaggttcatgacgaactgattcttgaagctcctcgtgaggaagtcgaacgcctggttcagattgtacccgaggtcatggagaacgccatccagttaaccgtcccactgaaagttgattatcactacggtcctacgtggtacgacgctaag

SEQ ID NO: 420 - protein, 604 aa, synthetic construct
  REGION 1..604: note = Variant of DNA polymerase
MHHHHHHGGSGMVAPQTKKEEAVMPNINYTIVEEVTEPILADRSALVVEVLGSNYHKAPILGFALANEHGNFFIRTDTALSSPLFTAWLEDESKKKSVFDAKRAIVALKWKGIELRGIEFDLLLASYLLNPSQRTPDVASVAKTKQYMAVQSDWAVYGKGAKQTVPDENVLAEHLVRKAAAIRALEKELIHDLQENEQYALFTDLELPLSSVLAEMEFTGMKVDVERLKEMGEELTEQLRQVEQEIYKLAGQRFNINSPKQLGVILFEKLQLPVLKKTKTGYSTSADVLEKLARQHEIVRKILHYRQLGKLQSTYIEGLLKVVHRDTHKVHTIFNQALTQTGRLSSTEPNLQNIPIRLEEGRKIRQAFVPSKPDWVIFSADYSQIELRVLAHLANDENLIDAFRHDLDIHTKTAMDIFHVTADEVTPNMRRLAKAVNFGIVYGISDYGLSQRLGITRKEAAEFIRRYFESFPGVKQYMENIVKEAKQKGYVTTLLHRRRYLPDIHSRNRNLRSFAERTAMNTPIQGSAADIIKKAMIDLADRLKREHLQARMLLQVHDELILEAPREEVERLVQIVPEVMENAIQLTVPLKVDYHYGPTWYDAK

SEQ ID NO: 421 - DNA, 1812 bp, synthetic construct
  misc_feature 1..1812: note = Variant of DNA polymerase
  source 1..1812: mol_type = other DNA
atgcatcaccatcaccatcacggtggcagcggtatggttgcaccacagaccaaaaaagaagaggccgtaatgcctaacatcaattatacaattgtggaggaagtcaccgaaccgattctcgcggatcgttcggcgttagtggttgaggttctggggtccaactaccataaggctccgatcctgggctttgccctggccaatgagcacggtaacttcttcattcgcactgacacggctctttcttctccgctgtttaccgcgtggctggaggatgagagcaagaagaaatcagtattcgacgctaaacgcgcaatcgtggccctgaaatggaaaggcattgaataccgtggcatcgaatttgacttgttgctggcttcatatctcctgaatccctcgcagcgtacgccggatgtcgcaagcgtggccaagaccaaacagtacatggcagtacagagtgattgggcagtctatggaaaaggtgcgaaacaaacggtgccagatgaaaacgttttagccgaacatctggtgcgtaaagctgctgcaattcgcgccctggagaaagaactgatccacgatttgcaggaaaatgaacaatacgccctgtttactgaccttgaattacctctgtcctcggtcctggcagagatggaatttaccggtatgaaagtagatgttgaacgcctgaaagaaatgggcgaggagctcacagaacaactgcgccaagtggagcaggaaatctataagttagctggccaacgcttcaacattaacagccctaaacaactgggtgtcattctgtttgaaaaattacagcttcccgtcctgaagaagacgaagaccggctatagtacgagtgctgatgtgctcgagaaacttgcccgtcagcatgaaatcgtccgcaaaattcttcactaccgtcagctcggtaaactgcaatccacatatattgaagggctgctgaaagttgtacatcgcgacacccataaagtccacaccatcttcaaccaggccctgactcaaaccgggcgcctgtcaagcaccgaacctaatctccagaacatcccaattcgtctggaagaaggccgcaaaattcgccaagcatttgtgccatcgaaacctgactgggttatctttagcgcagattactcacagattgagctccgtgttctcgcacacctggcaaacgatgaaaatctgatcgatgcttttcgtcatgaccttgacatccatacgaagacagccatggatattttccatgtaacagcagatgaagttacccccaatatgcgtcgcctggcaaaagccgtgaacttcggtattgtctatgggatctctgattacggtctgagtcagcgtcttggcatcacgcgcaaagaagccgccgaatttattcgtcgttatttcgaaagctttcccggcgttaaacagtacatggagaatattgtaaaagaagccaaacagaaaggatacgtcaccacccttttacaccgccgccgctatctgccagacatccattctcgtaatcgcaacttacgttcattcgcagaacgcacggccatgaacaccccaattcaaggatcagccgccgacatcatcaagaaggcaatgattgatttagctgatcgtctgaaacgcgagcaccttcaagctcgtatgctgctccaggttcatgacgaactgattcttgaagctcctcgtgaggaagtcgaacgcctggttcagattgtacccgaggtcatggagaacgccatccagttaaccgtcccactgaaagttgattatcactacggtcctacgtggtacgacgctaag

SEQ ID NO: 422 - protein, 604 aa, synthetic construct
  REGION 1..604: note = Variant of DNA polymerase
MHHHHHHGGSGMVAPQTKKEEAVMPNINYTIVEEVTEPILADRSALVVEVLGSNYHKAPILGFALANEHGNFFIRTDTALSSPLFTAWLEDESKKKSVFDAKRAIVALKWKGIEYRGIEFDLLLASYLLNPSQRTPDVASVAKTKQYMAVQSDWAVYGKGAKQTVPDENVLAEHLVRKAAAIRALEKELIHDLQENEQYALFTDLELPLSSVLAEMEFTGMKVDVERLKEMGEELTEQLRQVEQEIYKLAGQRFNINSPKQLGVILFEKLQLPVLKKTKTGYSTSADVLEKLARQHEIVRKILHYRQLGKLQSTYIEGLLKVVHRDTHKVHTIFNQALTQTGRLSSTEPNLQNIPIRLEEGRKIRQAFVPSKPDWVIFSADYSQIELRVLAHLANDENLIDAFRHDLDIHTKTAMDIFHVTADEVTPNMRRLAKAVNFGIVYGISDYGLSQRLGITRKEAAEFIRRYFESFPGVKQYMENIVKEAKQKGYVTTLLHRRRYLPDIHSRNRNLRSFAERTAMNTPIQGSAADIIKKAMIDLADRLKREHLQARMLLQVHDELILEAPREEVERLVQIVPEVMENAIQLTVPLKVDYHYGPTWYDAK

SEQ ID NO: 423 - DNA, 1812 bp, synthetic construct
  misc_feature 1..1812: note = Variant of DNA polymerase
  source 1..1812: mol_type = other DNA
atgcatcaccatcaccatcacggtggcagcggtatggttgcaccacagaccaaaaaagaagaggccgtaatgatgaacatcaattatacaattgtggaggaagtcaccgaaccgattctcgcggatcgttcggcgttagtggttgaggttctggggtccaactaccataaggctccgatcctgggctttgccctggccaatgagcacggtaacttcttcattcgcactgacacggctctttcttctccgctgtttaccgcgtggctggaggatgagagcaagaagaaatcagtattcgacgctaaacgcgcaatcgtggccctgaaatggaaaggcattgaactgcgtggcatcgaatttgacttgttgctggcttcatatctcctgaatccctcgcagcgtacgccggatgtcgcaagcgtggccaagaccaaacagtacatggcagtacagagtgattgggcagtctatggaaaaggtgcgaaacaaacggtgccagatgaaaacgttttagccgaacatctggtgcgtaaagctgctgcaattcgcgccctggagaaagaactgatccacgatttgcaggaaaatgaacaatacgccctgtttactgaccttgaattacctctgtcctcggtcctggcagagatggaatttaccggtatgaaagtagatgttgaacgcctgaaagaaatgggcgaggagctcacagaacaactgcgccaagtggagcaggaaatctataagttagctggccaacgcttcaacattaacagccctaaacaactgggtgtcattctgtttgaaaaattacagcttcccgtcctgaagaagacgaagaccggctatagtacgagtgctgatgtgctcgagaaacttgcccgtcagcatgaaatcgtccgcaaaattcttcactaccgtcagctcggtaaactgcaatccacatatattgaagggctgctgaaagttgtacatcgcgacacccataaagtccacaccatcttcaaccaggccctgactcaaaccgggcgcctgtcaagcaccgaacctaatctccagaacatcccaattcgtctggaagaaggccgcaaaattcgccaagcatttgtgccatcgaaacctgactgggttatctttagcgcagattactcacagattgagctccgtgttctcgcacacctggcaaacgatgaaaatctgatcgatgcttttcgtcatgaccttgacatccatacgaagacagccatggatattttccatgtaacagcagatgaagttacccccaatatgcgtcgcctggcaaaagccgtgaacttcggtattgtctatgggatctctgattacggtctgagtcagcgtcttggcatcacgcgcaaagaagccgccgaatttattcgtcgttatttcgaaagctttcccggcgttaaacagtacatggagaatattgtaaaagaagccaaacagaaaggatacgtcaccacccttttacaccgccgccgctatctgccagacatccattctcgtaatcgcaacttacgttcattcgcagaacgcacggccatgaacaccccaattcaaggatcagccgccgacatcatcaagaaggcaatgattgatttagctgatcgtctgaaacgcgagcaccttcaagctcgtatgctgctccaggttcatgacgaactgattcttgaagctcctcgtgaggaagtcgaacgcctggttcagattgtacccgaggtcatggagaacgccatccagttaaccgtcccactgaaagttgattatcactacggtcctacgtggtacgacgctaag

SEQ ID NO: 424 - protein, 604 aa, synthetic construct
  REGION 1..604: note = Variant of DNA polymerase
MHHHHHHGGSGMVAPQTKKEEAVMMNINYTIVEEVTEPILADRSALVVEVLGSNYHKAPILGFALANEHGNFFIRTDTALSSPLFTAWLEDESKKKSVFDAKRAIVALKWKGIELRGIEFDLLLASYLLNPSQRTPDVASVAKTKQYMAVQSDWAVYGKGAKQTVPDENVLAEHLVRKAAAIRALEKELIHDLQENEQYALFTDLELPLSSVLAEMEFTGMKVDVERLKEMGEELTEQLRQVEQEIYKLAGQRFNINSPKQLGVILFEKLQLPVLKKTKTGYSTSADVLEKLARQHEIVRKILHYRQLGKLQSTYIEGLLKVVHRDTHKVHTIFNQALTQTGRLSSTEPNLQNIPIRLEEGRKIRQAFVPSKPDWVIFSADYSQIELRVLAHLANDENLIDAFRHDLDIHTKTAMDIFHVTADEVTPNMRRLAKAVNFGIVYGISDYGLSQRLGITRKEAAEFIRRYFESFPGVKQYMENIVKEAKQKGYVTTLLHRRRYLPDIHSRNRNLRSFAERTAMNTPIQGSAADIIKKAMIDLADRLKREHLQARMLLQVHDELILEAPREEVERLVQIVPEVMENAIQLTVPLKVDYHYGPTWYDAK

SEQ ID NO: 425 - DNA, 1812 bp, synthetic construct
  misc_feature 1..1812: note = Variant of DNA polymerase
  source 1..1812: mol_type = other DNA
atgcatcaccatcaccatcacggtggcagcggtatggttgcaccacagaccaaaaaagaagaggccgtaatgcctaacatcaattatacaattgtggaggaagtcaccgaaccgattctcgcggatcgttcggcgttagtggttgaggttctggggtccaactaccataaggctccgatcctgggctttgccctggccaatgagcacggtaacttcttcattcgcactgacacggctctttcttctccgctgtttaccgcgtggctggaggatgagagcaagaagaaatcagtattcgacgctaaacgcgcaatcgtggccctgaaatggaaaggcattgaataccgtggcatcgaatttgacttgttgctggcttcatatctcctgaatccctcgcagcgtacgccggatgtcgcaagcgtggccaagaccaaacagtacatggcagtacagagtgattgggcagtctatggaaaaggtgcgaaacaaacggtgccagatgaaaacgttttagccgaacatctggtgcgtaaagctgctgcaattcgcgccctggagaaagaactgatccacgatttgcaggaaaatgaacaatacgccctgtttactgaccttgaattacctctgtcctcggtcctggcagagatggaatttaccggtatgaaagtagatgttgaacgcctgaaagaaatgggcgaggagctcacagaacaactgcgccaagtggagcaggaaatctataagttagctggccaacgcttcaacattaacagccctaaacaactgggtgtcattctgtttgaaaaattacagcttcccgtcctgaagaagacgaagaccggctatagtacgagtgctgatgtgctcgagaaacttgcccgtcagcatgaaatcgtccgcaaaattcttcactaccgtcagctcggtaaactgcaatccacatatattgaagggctgctgaaagttgtacatcgcgacacccataaagtccacaccatcttcaaccaggccctgactcaaaccgggcgcctgtcaagcaccgaacctaatctccagaacatcccaattcgtctggaagaaggccgcaaaattcgccaagcatttgtgccatcgaaacctgactgggttatctttagcgcagattactcacagattgagctccgtgttctcgcacacctggcaaacgatgaaaatctgatcgatgcttttcgtcatgaccttgacatccatacgaagacagccatggatattttccatgtaacagcagatgaagttacccccaatatgcgtcgcctggcaaaagccgtgaacttcggtattgtctatgggatctctgattacggtctgagtcagcgtcttggcatcacgcgcaaagaagccgccgaatttattcgtcgttatttcgaaagctttcccggcgttaaacagtacatggagaatattgtaaaagaagccaaacagaaaggatacgtcaccacccttttacaccgccgccgctatctgccagacatccattctcgtaatcgcaacttacgttcattcgcagaacgcacggccatgaacaccccaattcaaggatcagccgccgacatcatcaagaaggcaatgattgatttagctgatcgtctgaaacgcgagcaccttcaagctcgtatgctgctccaggttcatgacgaactgattcttgaagctcctcgtgaggaagtcgaacgcctggttcaggttgtacccgaggtcatggagaacgccatccagttaaccgtcccactgaaagttgattatcactacggtcctacgtggtacgacgctaag

SEQ ID NO: 426 - protein, 604 aa, synthetic construct
  REGION 1..604: note = Variant of DNA polymerase
MHHHHHHGGSGMVAPQTKKEEAVMPNINYTIVEEVTEPILADRSALVVEVLGSNYHKAPILGFALANEHGNFFIRTDTALSSPLFTAWLEDESKKKSVFDAKRAIVALKWKGIEYRGIEFDLLLASYLLNPSQRTPDVASVAKTKQYMAVQSDWAVYGKGAKQTVPDENVLAEHLVRKAAAIRALEKELIHDLQENEQYALFTDLELPLSSVLAEMEFTGMKVDVERLKEMGEELTEQLRQVEQEIYKLAGQRFNINSPKQLGVILFEKLQLPVLKKTKTGYSTSADVLEKLARQHEIVRKILHYRQLGKLQSTYIEGLLKVVHRDTHKVHTIFNQALTQTGRLSSTEPNLQNIPIRLEEGRKIRQAFVPSKPDWVIFSADYSQIELRVLAHLANDENLIDAFRHDLDIHTKTAMDIFHVTADEVTPNMRRLAKAVNFGIVYGISDYGLSQRLGITRKEAAEFIRRYFESFPGVKQYMENIVKEAKQKGYVTTLLHRRRYLPDIHSRNRNLRSFAERTAMNTPIQGSAADIIKKAMIDLADRLKREHLQARMLLQVHDELILEAPREEVERLVQVVPEVMENAIQLTVPLKVDYHYGPTWYDAK

SEQ ID NO: 427 - DNA, 1812 bp, synthetic construct
  misc_feature 1..1812: note = Variant of DNA polymerase
  source 1..1812: mol_type = other DNA
atgcatcaccatcaccatcacggtggcagcggtatggttgcaccacagaccaaaaaagaagaggccgtactgcctaacatcaattatacaattgtggaggaagtcaccgaaccgattctcgcggatcgttcggcgttagtggttgaggttctggggtccaactaccataaggctccgatcctgggctttgccctggccaatgagcacggtaacttcttcattcgcactgacacggctctttcttctccgctgtttaccgcgtggctggaggatgagagcaagaagaaatcagtattcgacgctaaacgcgcaatcgtggccctgaaatggaaaggcattgaattacgtggcatcgaatttgacttgttgctggcttcatatctcctgaatccctcgcagcgtacgccggatgtcgcaagcgtggccaagaccaaacagtacatggcagtacagagtgattgggcagtctatggaaaaggtgcgaaacaaacggtgccagatgaaaacgttttagccgaacatctggtgcgtaaagctgctgcaattcgcgccctggagaaagaactgatccacgatttgcaggaaaatgaacaatacgccctgtttactgaccttgaattacctctgtcctcggtcctggcagagatggaatttaccggtgtgaaagtagatgttgaacgcctgaaagaaatgggcgaggagctcacagaacaactgcgccaagtggagcaggaaatctataagttagctggccaacgcttcaacattaacagccctaaacaactgggtgtcattctgtttgaaaaattacagcttcccgtcctgaagaagacgaagaccggctatagtacgagtgctgatgtgctcgagaaacttgcccgtcagcatgaaatcgtccgcaaaattcttcactaccgtcagctcggtaaactgcaatccacatatattgaagggctgctgaaagttgtacatcgcgacacccataaagtccacaccatcttcaaccaggccctgactcaaaccgggcgcctgtcaagcaccgaacctaatctccagaacatcccaattcgtctggaagaaggccgcaaaattcgccaagcatttgtgccatcgaaacctgactgggttatctttagcgcagattactcacagattgagctccgtgttctcgcacacctggcaaacgatgaaaatctgatcgatgcttttcgtcatgaccttgacatccatacgaagacagccatggatattttccatgtaacagcagatgaagttacccccaatatgcgtcgcctggcaaaagccgtgaacttcggtattgtctatgggatctctgattacggtctgagtcagcgtcttggcatcacgcgcaaagaagccgccgaatttattcgtcgttatttcgaaagctttcccggcgttaaacagtacatggagaatattgtaaaagaagccaaacagaaaggatacgtcaccacccttttacaccgccgccgctatctgccagacatccattctcgtaatcgcaacttacgttcattcgcagaacgcacggccatgaacaccccaattcaaggatcagccgccgacatcatcaagaaggcaatgattgatttagctgatcgtctgaaacgcgagcaccttcaagctcgtatgctgctccaggttcatgacgaactgattcttgaagctcctcgtgaggaagtcgaacgcctggttcagattgtacccgaggtcatggagaacgccatccagttaaccgtcccactgaaagttgattatcactacggtcctacgtggtacgacgctaag

SEQ ID NO: 428 - protein, 604 aa, synthetic construct
  REGION 1..604: note = Variant of DNA polymerase
MHHHHHHGGSGMVAPQTKKEEAVLPNINYTIVEEVTEPILADRSALVVEVLGSNYHKAPILGFALANEHGNFFIRTDTALSSPLFTAWLEDESKKKSVFDAKRAIVALKWKGIELRGIEFDLLLASYLLNPSQRTPDVASVAKTKQYMAVQSDWAVYGKGAKQTVPDENVLAEHLVRKAAAIRALEKELIHDLQENEQYALFTDLELPLSSVLAEMEFTGVKVDVERLKEMGEELTEQLRQVEQEIYKLAGQRFNINSPKQLGVILFEKLQLPVLKKTKTGYSTSADVLEKLARQHEIVRKILHYRQLGKLQSTYIEGLLKVVHRDTHKVHTIFNQALTQTGRLSSTEPNLQNIPIRLEEGRKIRQAFVPSKPDWVIFSADYSQIELRVLAHLANDENLIDAFRHDLDIHTKTAMDIFHVTADEVTPNMRRLAKAVNFGIVYGISDYGLSQRLGITRKEAAEFIRRYFESFPGVKQYMENIVKEAKQKGYVTTLLHRRRYLPDIHSRNRNLRSFAERTAMNTPIQGSAADIIKKAMIDLADRLKREHLQARMLLQVHDELILEAPREEVERLVQIVPEVMENAIQLTVPLKVDYHYGPTWYDAK

SEQ ID NO: 429 - DNA, 1812 bp, synthetic construct
  misc_feature 1..1812: note = Variant of DNA polymerase
  source 1..1812: mol_type = other DNA
atgcatcaccatcaccatcacggtggcagcggtatggttgcaccacagaccaaaaaagaagaggccgtaatgcctaacatcaattatacaattgtggaggacgtcaccgaaccgattctcgcggatcgttcggcgttagtggttgaggttctggggtccaactaccataaggctccgatcctgggctttgccctggccaatgagcacggtaacttcttcattcgcactgacacggctctttcttctccgctgtttaccgcgtggctggaggatgagagcaagaagaaatcagtattcgacgctaaacgcgcaatcgtggccctgaaatggaaaggcattgaattacgtggcatcgaatttgacttgttgctggcttcatatctcctgaatccctcgcagcgtacgccggatgtcgcaagcgtggccaagaccaaacagtacatggcagtacagagtgattgggcagtctatggaaaaggtgcgaaacaaacggtgccagatgaaaacgttttagccgaacatctggtgcgtaaagctgctgcaattcgcgccctggagaaagaactgatccacgatttgcaggaaaatgaacaatacgccctgtttactgaccttgaattacctctgtcctcggtcctggcagagatggaatttaccggtgtgaaagtagatgttgaacgcctgaaagaaatgggcgaggagctcacagaacaactgcgccaagtggagcaggaaatctataagttagctggccaacgcttcaacattaacagccctaaacaactgggtgtcattctgtttgaaaaattacagcttcccgtcctgaagaagacgaagaccggctatagtacgagtgctgatgtgctcgagaaacttgcccgtcagcatgaaatcgtccgcaaaattcttcactaccgtcagctcggtaaactgcaatccacatatattgaagggctgctgaaagttgtacatcgcgacacccataaagtccacaccatcttcaaccaggccctgactcaaaccgggcgcctgtcaagcaccgaacctaatctccagaacatcccaattcgtctggaagaaggccgcaaaattcgccaagcatttgtgccatcgaaacctgactgggttatctttagcgcagattactcacagattgagctccgtgttctcgcacacctggcaaacgatgaaaatctgatcgatgcttttcgtcatgaccttgacatccatacgaagacagccatggatattttccatgtaacagcagatgaagttacccccaatatgcgtcgcctggcaaaagccgtgaacttcggtattgtctatgggatctctgattacggtctgagtcagcgtcttggcatcacgcgcaaagaagccgccgaatttattcgtcgttatttcgaaagctttcccggcgttaaacagtacatggagaatattgtaaaagaagccaaacagaaaggatacgtcaccacccttttacaccgccgccgctatctgccagacatccattctcgtaatcgcaacttacgttcattcgcagaacgcacggccatgaacaccccaattcaaggatcagccgccgacatcatcaagaaggcaatgattgatttagctgatcgtctgaaacgcgagcaccttcaagctcgtatgctgctccaggttcatgacgaactgattcttgaagctcctcgtgaggaagtcgaacgcctggttcagattgtacccgaggtcatggagaacgccatccagttaaccgtcccactgaaagttgattatcactacggtcctacgtggtacgacgctaag

SEQ ID NO: 430 - protein, 604 aa, synthetic construct
  REGION 1..604: note = Variant of DNA polymerase
MHHHHHHGGSGMVAPQTKKEEAVMPNINYTIVEDVTEPILADRSALVVEVLGSNYHKAPILGFALANEHGNFFIRTDTALSSPLFTAWLEDESKKKSVFDAKRAIVALKWKGIELRGIEFDLLLASYLLNPSQRTPDVASVAKTKQYMAVQSDWAVYGKGAKQTVPDENVLAEHLVRKAAAIRALEKELIHDLQENEQYALFTDLELPLSSVLAEMEFTGVKVDVERLKEMGEELTEQLRQVEQEIYKLAGQRFNINSPKQLGVILFEKLQLPVLKKTKTGYSTSADVLEKLARQHEIVRKILHYRQLGKLQSTYIEGLLKVVHRDTHKVHTIFNQALTQTGRLSSTEPNLQNIPIRLEEGRKIRQAFVPSKPDWVIFSADYSQIELRVLAHLANDENLIDAFRHDLDIHTKTAMDIFHVTADEVTPNMRRLAKAVNFGIVYGISDYGLSQRLGITRKEAAEFIRRYFESFPGVKQYMENIVKEAKQKGYVTTLLHRRRYLPDIHSRNRNLRSFAERTAMNTPIQGSAADIIKKAMIDLADRLKREHLQARMLLQVHDELILEAPREEVERLVQIVPEVMENAIQLTVPLKVDYHYGPTWYDAK

SEQ ID NO: 431 - DNA, 1812 bp, synthetic construct
  misc_feature 1..1812: note = Variant of DNA polymerase
  source 1..1812: mol_type = other DNA
atgcatcaccatcaccatcacggtggcagcggtatggttgcaccacagaccaaaaaagaagaggccgtaatgcctaacatcaattatacaattgtggaggaagtcaccgaaccgattctcgcggatcgttcggcgttagtggttgaggttctggggtccaactaccataaggctccgatcctgggctttgccctggccaatgagcacggtaacttcttcattcgcactgacacggctctttcttctccgctgtttaccgcgtggctggaggatgagagcaagaagaaatcagtattcgacgctaaacgcgcaatcgtggccctgaaatggaaaggcattgaattacgtggcatcgaatttgacttgttgctggcttcatatctcctgaatccctcgcagcgtacgccggatgtcgcaagcgtggccaagaccaaacagtacatggcagtacagagtgattgggcagtctatggaaaaggtgcgaaacaaacggtgccagatgaaaacgttttagccgaacatctggtgcgtaaagctgctgcaattcgcgccctggagaaagaactgatccacgatttgcaggaaaatgaacaatacgccctgtttactgaccttgaattacctctgtcctcggtcctggcagagatggaatttaccggtgtgaaagtagatgttgaacgcctgaaagaaatgggcgaggagctcacagaacaactgcgccaagtggagcaggaaatctataagttagctggccaacgcttcaacattaacagccctaaacaactgggtgtcattctgtttgaaaaattacagcttcccgtcctgaagaagacgaagaccggctatagtacgagtgctgatgtgctcgagaaacttgcccgtcagcatgaaatcgtccgcaaaattcttcactaccgtcagctcggtaaactgcaatccacatatattgaagggctgctgaaagttgtacatcgcgacacccataaagtccacaccatcttcaaccaggccctgactcaaaccgggcgcctgtcaagcaccgaacctaatctccagaacatcccaattcgtctggaagaaggccgcaaaattcgccaagcatttgtgccatcgaaacctgactgggttatctttagcgcagattactcacagattgagctccgtgttctcgcacacctggcaaacgatgaaaatctgatcgatgcttttcgtcatgaccttgacatccatacgaagacagccatggatattttccatgtaacagcagatgaagttacccccaatatgcgtcgcctggcaaaagccgtgaacttcggtattgtctatgggatctctgattacggtctgagtcagcgtcttggcatcacgcgcaaagaagccgccgaatttattcgtcgttatttcgaaagctttcccggcgttaaacagtacatggagaatattgtaaaagaagccaaacagaaaggatacgtcaccacccttttacaccgccgccgctatctgccagacatccattctcgtaatcgcaacttacgttcattcgcagaacgcacggccatgaacaccccaattcaaggatcagccgccgacatcatcaagaaggcaatgattgatttagctgatcgtctgaaacgcgagcaccttcaagctcgtatgctgctccaggttcatgacgaactgattcttgaagctcctcgtgaggaagtcgaacgcctggttcaggttgtacccgaggtcatggagaacgccatccagttaaccgtcccactgaaagttgattatcactacggtcctacgtggtacgacgctaag

SEQ ID NO: 432 - protein, 604 aa, synthetic construct
  REGION 1..604: note = Variant of DNA polymerase
MHHHHHHGGSGMVAPQTKKEEAVMPNINYTIVEEVTEPILADRSALVVEVLGSNYHKAPILGFALANEHGNFFIRTDTALSSPLFTAWLEDESKKKSVFDAKRAIVALKWKGIELRGIEFDLLLASYLLNPSQRTPDVASVAKTKQYMAVQSDWAVYGKGAKQTVPDENVLAEHLVRKAAAIRALEKELIHDLQENEQYALFTDLELPLSSVLAEMEFTGVKVDVERLKEMGEELTEQLRQVEQEIYKLAGQRFNINSPKQLGVILFEKLQLPVLKKTKTGYSTSADVLEKLARQHEIVRKILHYRQLGKLQSTYIEGLLKVVHRDTHKVHTIFNQALTQTGRLSSTEPNLQNIPIRLEEGRKIRQAFVPSKPDWVIFSADYSQIELRVLAHLANDENLIDAFRHDLDIHTKTAMDIFHVTADEVTPNMRRLAKAVNFGIVYGISDYGLSQRLGITRKEAAEFIRRYFESFPGVKQYMENIVKEAKQKGYVTTLLHRRRYLPDIHSRNRNLRSFAERTAMNTPIQGSAADIIKKAMIDLADRLKREHLQARMLLQVHDELILEAPREEVERLVQVVPEVMENAIQLTVPLKVDYHYGPTWYDAK

SEQ ID NO: 433 - DNA, 1812 bp, synthetic construct
  misc_feature 1..1812: note = Variant of DNA polymerase
  source 1..1812: mol_type = other DNA
atgcatcaccatcaccatcacggtggcagcggtatggttgcaccacagaccaaaaaagaagaggccgtactgccgaacatcaattatacaattgtggaggaagtcaccgaaccgattctcgcggatcgttcggcgttagtggttgaggttctggggtccaactaccataaggctccgatcctgggctttgccctggccaatgagcacggtaacttcttcattcgcactgacacggctctttcttctccgctgtttaccgcgtggctggaggatgagagcaagaagaaatcagtattcgacgctaaacgcgcaatcgtggccctgaaatggaaaggcattgaattacgtggcatcgaatttgacttgttgctggcttcatatctcctgaatccctcgcagcgtacgccggatgtcgcaagcgtggccaagaccaaacagtacatggcagtacagagtgattgggcagtctatggaaaaggtgcgaaacaaacggtgccagatgaaaacgttttagccgaacatctggtgcgtaaagctgctgcaattcgcaccctggagaaagaactgatccacgatttgcaggaaaatgaacaatacgccctgtttactgaccttgaattacctctgtcctcggtcctggcagagatggaatttaccggtatgaaagtagatgttgaacgcctgaaagaaatgggcgaggagctcacagaacaactgcgccaagtggagcaggaaatctataagttagctggccaacgcttcaacattaacagccctaaacaactgggtgtcattctgtttgaaaaattacagcttcccgtcctgaagaagacgaagaccggctatagtacgagtgctgatgtgctcgagaaacttgcccgtcagcatgaaatcgtccgcaaaattcttcactaccgtcagctcggtaaactgcaatccacatatattgaagggctgctgaaagttgtacatcgcgacacccataaagtccacaccatcttcaaccaggccctgactcaaaccgggcgcctgtcaagcaccgaacctaatctccagaacatcccaattcgtctggaagaaggccgcaaaattcgccaagcatttgtgccatcgaaacctgactgggttatctttagcgcagattactcacagattgagctccgtgttctcgcacacctggcaaacgatgaaaatctgatcgatgcttttcgtcatgaccttgacatccatacgaagacagccatggatattttccatgtaacagcagatgaagttacccccaatatgcgtcgcctggcaaaagccgtgaacttcggtattgtctatgggatctctgattacggtctgagtcagcgtcttggcatcacgcgcaaagaagccgccgaatttattcgtcgttatttcgaaagctttcccggcgttaaacagtacatggagaatattgtaaaagaagccaaacagaaaggatacgtcaccacccttttacaccgccgccgctatctgccagacatccattctcgtaatcgcaacttacgttcattcgcagaacgcacggccatgaacaccccaattcaaggatcagccgccgacatcatcaagaaggcaatgattgatttagctgatcgtctgaaacgcgagcaccttcaagctcgtatgctgctccaggttcatgacgaactgattcttgaagctcctcgtgaggaagtcgaacgcctggttcaggttgtacccgaggtcatggagaacgccatccagttaaccgtcccactgaaagttgattatcactacggtcctacgtggtacgacgctaag

SEQ ID NO: 434 - protein, 604 aa, synthetic construct
  REGION 1..604: note = Variant of DNA polymerase
MHHHHHHGGSGMVAPQTKKEEAVLPNINYTIVEEVTEPILADRSALVVEVLGSNYHKAPILGFALANEHGNFFIRTDTALSSPLFTAWLEDESKKKSVFDAKRAIVALKWKGIELRGIEFDLLLASYLLNPSQRTPDVASVAKTKQYMAVQSDWAVYGKGAKQTVPDENVLAEHLVRKAAAIRTLEKELIHDLQENEQYALFTDLELPLSSVLAEMEFTGMKVDVERLKEMGEELTEQLRQVEQEIYKLAGQRFNINSPKQLGVILFEKLQLPVLKKTKTGYSTSADVLEKLARQHEIVRKILHYRQLGKLQSTYIEGLLKVVHRDTHKVHTIFNQALTQTGRLSSTEPNLQNIPIRLEEGRKIRQAFVPSKPDWVIFSADYSQIELRVLAHLANDENLIDAFRHDLDIHTKTAMDIFHVTADEVTPNMRRLAKAVNFGIVYGISDYGLSQRLGITRKEAAEFIRRYFESFPGVKQYMENIVKEAKQKGYVTTLLHRRRYLPDIHSRNRNLRSFAERTAMNTPIQGSAADIIKKAMIDLADRLKREHLQARMLLQVHDELILEAPREEVERLVQVVPEVMENAIQLTVPLKVDYHYGPTWYDAK

SEQ ID NO: 435 - DNA, 1812 bp, synthetic construct
  misc_feature 1..1812: note = Variant of DNA polymerase
  source 1..1812: mol_type = other DNA
atgcatcaccatcaccatcacggtggcagcggtatggttgcaccacagaccaaaaaagaagaggccgtaatgcctaacatcaattatacaattgtggaggaagtcaccgaaccgattctcgcggatcgttcggcgttagtggttgaggttctggggtccaactaccataaggctccgatcctgggctttgccctggccaatgagcacggtaacttcttcattcgcactgacacggctctttcttctccgctgtttaccgcgtggctggaggatgagagcaagaagaaatcagtattcgacgctaaacgcgcaatcgtggccctgaaatggaaaggcattgaattacgtggcatcgaatttgacttgttgctggcttcatatctcctgaatccctcgcagcgtacgccggatgtcgcaagcgtggccaagaccaaacagtacatggcagtacagagtgattgggcagtctatggaaaaggtgcgaaacaaacggtgccagatgaaaacgttttagccgaacatctggtgcgtaaagctgctgcaattcgcgccctggagaaagaactgatccacgatttgcaggaaaatgaacaatacgccctgtttactgaccttgaattacctctgtcctcggtcctggcagagatggaatttaccggtgtgaaagtagatgttgaacgcctgaaagaaatgggcgaggagctcacagaacaactgcgccaagtggagcaggaaatctataagttagctggccaacgcttcaacattaacagccctaaacaactgggtgtcattctgtttgaaaaattacagcttcccgtcctgaagaagacgaagaccggctatagtacgagtgctgatgtgctcgagaaacttgcccgtcagcatgaaatcgtccgcaaaattcttcactaccgtcagctcggtaaactgcaatccacatatattgaagggctgctgaaagttgtacatcgcgacacccataaagtccacaccatcttcaaccaggccctgactcaaaccgggcgcctgtcaagcaccgaacctaatctccagaacatcccaattcgtctggaagaaggccgcaaaattcgccaagcatttgtgccatcgaaacctgactgggttatctttagcgcagattactcacagattgagctccgtgttctcgcacacctggcaaacgatgaaaatctgatcgatgcttttcgtcatgaccttgacatccatacgaagacagccatggatattttccatgtaacagcagatgaagttacccccaatatgcgtcgcctggcaaaagccgtgaacttcggtattgtctatgggatctctgattacggtctgagtcagcgtcttggcatcacgcgcaaagaagccgccgaatttattcgtcgttatttcgaaagctttcccggcgttaaacagtacatggagaatattgtaaaagaagccaaacagaaaggatacgtcaccacccttttacaccgccgccgctatctgccagacatccattctcgtaatcgcaacttacgttcattcgcagaacgcacggccatgaacaccccaattcaaggatcagccgccgacatcatcaagaaggcaatgattgatttagctgatcgtctgaaacgcgagcaccttcaagctcgtatgctgctccaggttcatgacgaactgattcttgaagctcctcgtgaggaagtcgaacgcctggttcagattgtacccgaggtcatggagaacgccatccagttaaccgtcccactgaaagttgattatcactacggtcctacgtggtacgacgctaag

SEQ ID NO: 436 - protein, 604 aa, synthetic construct
  REGION 1..604: note = Variant of DNA polymerase
MHHHHHHGGSGMVAPQTKKEEAVMPNINYTIVEEVTEPILADRSALVVEVLGSNYHKAPILGFALANEHGNFFIRTDTALSSPLFTAWLEDESKKKSVFDAKRAIVALKWKGIELRGIEFDLLLASYLLNPSQRTPDVASVAKTKQYMAVQSDWAVYGKGAKQTVPDENVLAEHLVRKAAAIRALEKELIHDLQENEQYALFTDLELPLSSVLAEMEFTGVKVDVERLKEMGEELTEQLRQVEQEIYKLAGQRFNINSPKQLGVILFEKLQLPVLKKTKTGYSTSADVLEKLARQHEIVRKILHYRQLGKLQSTYIEGLLKVVHRDTHKVHTIFNQALTQTGRLSSTEPNLQNIPIRLEEGRKIRQAFVPSKPDWVIFSADYSQIELRVLAHLANDENLIDAFRHDLDIHTKTAMDIFHVTADEVTPNMRRLAKAVNFGIVYGISDYGLSQRLGITRKEAAEFIRRYFESFPGVKQYMENIVKEAKQKGYVTTLLHRRRYLPDIHSRNRNLRSFAERTAMNTPIQGSAADIIKKAMIDLADRLKREHLQARMLLQVHDELILEAPREEVERLVQIVPEVMENAIQLTVPLKVDYHYGPTWYDAK

SEQ ID NO: 437 - DNA, 1812 bp, synthetic construct
  misc_feature 1..1812: note = Variant of DNA polymerase
  source 1..1812: mol_type = other DNA
atgcatcaccatcaccatcacggtggcagcggtatggttgcaccacagaccaaaaaagaagaggccgtaatgctgaacatcaattatacaattgtggaggaagtcaccgaaccgattctcgcggatcgttcggcgttagtggttgaggttctggggtccaactaccataagaagccgatcctgggctttgccctggccaatgagcacggtaacttcttcattcgcactgacacggctctttcttctccgctgtttaccgcgtggctggaggatgagagcaagaagaaatcagtattcgacgctaaacgcgcaatcgtggccctgaaatggaaaggcattgaataccgtggcatcgaatttgacttgttgctggcttcatatctcctgaatccctcgcagcgtacgccggatgtcgcaagcgtggccaagaccaaacagtacatggcagtacagagtgattgggcagtctatggaaaaggtgcgaaacaaacggtgccagatgaaaacgttttagccgaacatctggtgcgtaaagctgctgcaattcgcgccctggagaaagaactgatccacgatttgcaggaaaatgaacaatacgccctgtttactgaccttgaattacctctgtcctcggtcctggcagagatggaatttaccggtgtgaaagtagatgttgaacgcctgaaagaaatgggcgaggagctcacagaacaactgcgccaagtggagcaggaaatctataagttagctggccaacgcttcaacattaacagccctaaacaactgggtgtcattctgtttgaaaaattacagcttcccgtcctgaagaagacgaagaccggctatagtacgagtgctgatgtgctcgagaaacttgcccgtcagcatgaaatcgtccgcaaaattcttcactaccgtcagctcggtaaactgcaatccacatatattgaagggctgctgaaagttgtacatcgcgacacccataaagtccacaccatcttcaaccaggccctgactcaaaccgggcgcctgtcaagcaccgaacctaatctccagaacatcccaattcgtctggaagaaggccgcaaaattcgccaagcatttgtgccatcgaaacctgactgggttatctttagcgcagattactcacagattgagctccgtgttctcgcacacctggcaaacgatgaaaatctgatcgatgcttttcgtcatgaccttgacatccatacgaagacagccatggatattttccatgtaacagcagatgaagttacccccaatatgcgtcgcctggcaaaagccgtgaacttcggtattgtctatgggatctctgattacggtctgagtcagcgtcttggcatcacgcgcaaagaagccgccgaatttattcgtcgttatttcgaaagctttcccggcgttaaacagtacatggagaatattgtaaaagaagccaaacagaaaggatacgtcaccacccttttacaccgccgccgctatctgccagacatccattctcgtaatcgcaacttacgttcattcgcagaacgcacggccatgaacaccccaattcaaggatcagccgccgacatcatcaagaaggcaatgattgatttagctgatcgtctgaaacgcgagcaccttcaagctcgtatgctgctccaggttcatgacgaactgattcttgaagctcctcgtgaggaagtcgaacgcctggttcaggttgtacccgaggtcatggagaacgccatccagttaaccgtcccactgaaagttgattatcactacggtcctacgtggtacgacgctaag

SEQ ID NO: 438 - protein, 604 aa, synthetic construct
  REGION 1..604: note = Variant of DNA polymerase
MHHHHHHGGSGMVAPQTKKEEAVMLNINYTIVEEVTEPILADRSALVVEVLGSNYHKKPILGFALANEHGNFFIRTDTALSSPLFTAWLEDESKKKSVFDAKRAIVALKWKGIEYRGIEFDLLLASYLLNPSQRTPDVASVAKTKQYMAVQSDWAVYGKGAKQTVPDENVLAEHLVRKAAAIRALEKELIHDLQENEQYALFTDLELPLSSVLAEMEFTGVKVDVERLKEMGEELTEQLRQVEQEIYKLAGQRFNINSPKQLGVILFEKLQLPVLKKTKTGYSTSADVLEKLARQHEIVRKILHYRQLGKLQSTYIEGLLKVVHRDTHKVHTIFNQALTQTGRLSSTEPNLQNIPIRLEEGRKIRQAFVPSKPDWVIFSADYSQIELRVLAHLANDENLIDAFRHDLDIHTKTAMDIFHVTADEVTPNMRRLAKAVNFGIVYGISDYGLSQRLGITRKEAAEFIRRYFESFPGVKQYMENIVKEAKQKGYVTTLLHRRRYLPDIHSRNRNLRSFAERTAMNTPIQGSAADIIKKAMIDLADRLKREHLQARMLLQVHDELILEAPREEVERLVQVVPEVMENAIQLTVPLKVDYHYGPTWYDAK

SEQ ID NO: 439 - DNA, 1812 bp, synthetic construct
  misc_feature 1..1812: note = Variant of DNA polymerase
  source 1..1812: mol_type = other DNA
atgcatcaccatcaccatcacggtggcagcggtatggttgcaccacagaccaaaaaagaagaggccgtactgctgaacatcaattatacaattgtggaggaagtcaccgaaccgattctcgcggatcgttcggcgttagtggttgaggttctggggtccaactaccataaggctccgatcctgggctttgccctggccaatgagcacggtaacttcttcattcgcactgacacggctctttcttctccgctgtttaccgcgtggctggaggatgagagcaagaagaaatcagtattcgacgctaaacgcgcaatcgtggccctgaaatggaaaggcattgaattacgtggcatcgaatttgacttgttgctggcttcatatctcctgaatccctcgcagcgtacgccggatgtcgcaagcgtggccaagaccaaacagtacatggcagtacagagtgattgggcagtctatggaaaaggtgcgaaacaaacggtgccagatgaaaacgttttagccgaacatctggtgcgtaaagctgctgcaattcgcgccctggagaaagaactgatccacgatttgcaggaaaatgaacaatacgccctgtttactgaccttgaattacctctgtcctcggtcctggcagagatggaatttaccggtatgaaagtagatgttgaacgcctgaaagaaatgggcgaggagctcacagaacaactgcgccaagtggagcaggaaatctataagttagctggccaacgcttcaacattaacagccctaaacaactgggtgtcattctgtttgaaaaattacagcttcccgtcctgaagaagacgaagaccggctatagtacgagtgctgatgtgctcgagaaacttgcccgtcagcatgaaatcgtccgcaaaattcttcactaccgtcagctcggtaaactgcaatccacatatattgaagggctgctgaaagttgtacatcgcgacacccataaagtccacaccatcttcaaccaggccctgactcaaaccgggcgcctgtcaagcaccgaacctaatctccagaacatcccaattcgtctggaagaaggccgcaaaattcgccaagcatttgtgccatcgaaacctgactgggttatctttagcgcagattactcacagattgagctccgtgttctcgcacacctggcaaacgatgaaaatctgatcgatgcttttcgtcatgaccttgacatccatacgaagacagccatggatattttccatgtaacagcagatgaagttacccccaatatgcgtcgcctggcaaaagccgtgaacttcggtattgtctatgggatctctgattacggtctgagtcagcgtcttggcatcacgcgcaaagaagccgccgaatttattcgtcgttatttcgaaagctttcccggcgttaaacagtacatggagaatattgtaaaagaagccaaacagaaaggatacgtcaccacccttttacaccgccgccgctatctgccagacatccattctcgtaatcgcaacttacgttcattcgcagaacgcacggccatgaacaccccaattcaaggatcagccgccgacatcatcaagaaggcaatgattgatttagctgatcgtctgaaacgcgagcaccttcaagctcgtatgctgctccaggttcatgacgaactgattcttgaagctcctcgtgaggaagtcgaacgcctggttcagattgtacccgaggtcatggagaacgccatccagttaaccgtcccactgaaagttgattatcactacggtcctacgtggtacgacgctaag

SEQ ID NO: 440 - protein, 604 aa, synthetic construct
  REGION 1..604: note = Variant of DNA polymerase
MHHHHHHGGSGMVAPQTKKEEAVLLNINYTIVEEVTEPILADRSALVVEVLGSNYHKAPILGFALANEHGNFFIRTDTALSSPLFTAWLEDESKKKSVFDAKRAIVALKWKGIELRGIEFDLLLASYLLNPSQRTPDVASVAKTKQYMAVQSDWAVYGKGAKQTVPDENVLAEHLVRKAAAIRALEKELIHDLQENEQYALFTDLELPLSSVLAEMEFTGMKVDVERLKEMGEELTEQLRQVEQEIYKLAGQRFNINSPKQLGVILFEKLQLPVLKKTKTGYSTSADVLEKLARQHEIVRKILHYRQLGKLQSTYIEGLLKVVHRDTHKVHTIFNQALTQTGRLSSTEPNLQNIPIRLEEGRKIRQAFVPSKPDWVIFSADYSQIELRVLAHLANDENLIDAFRHDLDIHTKTAMDIFHVTADEVTPNMRRLAKAVNFGIVYGISDYGLSQRLGITRKEAAEFIRRYFESFPGVKQYMENIVKEAKQKGYVTTLLHRRRYLPDIHSRNRNLRSFAERTAMNTPIQGSAADIIKKAMIDLADRLKREHLQARMLLQVHDELILEAPREEVERLVQIVPEVMENAIQLTVPLKVDYHYGPTWYDAK

SEQ ID NO: 441 - DNA, 1812 bp, synthetic construct
  misc_feature 1..1812: note = Variant of DNA polymerase
  source 1..1812: mol_type = other DNA
atgcatcaccatcaccatcacggtggcagcggtatggttgcaccacagaccaaaaaagaagaggccgtactgatgaacatcaattatacaattgtggaggaagtcaccgaaccgattctcgcggatcgttcggcgttagtggttgaggttctggggtccaactaccataagaagccgatcctgggctttgccctggccaatgagcacggtaacttcttcattcgcactgacacggctctttcttctccgctgtttaccgcgtggctggaggatgagagcaagaagaaatcagtattcgacgctaaacgcgcaatcgtggccctgaaatggaaaggcattgaataccgtggcatcgaatttgacttgttgctggcttcatatctcctgaatccctcgcagcgtacgccggatgtcgcaagcgtggccaagaccaaacagtacatggcagtacagagtgattgggcagtctatggaaaaggtgcgaaacaaacggtgccagatgaaaacgttttagccgaacatctggtgcgtaaagctgctgcaattcgcgccctggagaaagaactgatccacgatttgcaggaaaatgaacaatacgccctgtttactgaccttgaattacctctgtcctcggtcctggcagagatggaatttaccggtgtgaaagtagatgttgaacgcctgaaagaaatgggcgaggagctcacagaacaactgcgccaagtggagcaggaaatctataagttagctggccaacgcttcaacattaacagccctaaacaactgggtgtcattctgtttgaaaaattacagcttcccgtcctgaagaagacgaagaccggctatagtacgagtgctgatgtgctcgagaaacttgcccgtcagcatgaaatcgtccgcaaaattcttcactaccgtcagctcggtaaactgcaatccacatatattgaagggctgctgaaagttgtacatcgcgacacccataaagtccacaccatcttcaaccaggccctgactcaaaccgggcgcctgtcaagcaccgaacctaatctccagaacatcccaattcgtctggaagaaggccgcaaaattcgccaagcatttgtgccatcgaaacctgactgggttatctttagcgcagattactcacagattgagctccgtgttctcgcacacctggcaaacgatgaaaatctgatcgatgcttttcgtcatgaccttgacatccatacgaagacagccatggatattttccatgtaacagcagatgaagttacccccaatatgcgtcgcctggcaaaagccgtgaacttcggtattgtctatgggatctctgattacggtctgagtcagcgtcttggcatcacgcgcaaagaagccgccgaatttattcgtcgttatttcgaaagctttcccggcgttaaacagtacatggagaatattgtaaaagaagccaaacagaaaggatacgtcaccacccttttacaccgccgccgctatctgccagacatccattctcgtaatcgcaacttacgttcattcgcagaacgcacggccatgaacaccccaattcaaggatcagccgccgacatcatcaagaaggcaatgattgatttagctgatcgtctgaaacgcgagcaccttcaagctcgtatgctgctccaggttcatgacgaactgattcttgaagctcctcgtgaggaagtcgaacgcctggttcagattgtacccgaggtcatggagaacgccatccagttaaccgtcccactgaaagttgattatcactacggtcctacgtggtacgacgctaag

SEQ ID NO: 442 - protein, 604 aa, synthetic construct
  REGION 1..604: note = Variant of DNA polymerase
MHHHHHHGGSGMVAPQTKKEEAVLMNINYTIVEEVTEPILADRSALVVEVLGSNYHKKPILGFALANEHGNFFIRTDTALSSPLFTAWLEDESKKKSVFDAKRAIVALKWKGIEYRGIEFDLLLASYLLNPSQRTPDVASVAKTKQYMAVQSDWAVYGKGAKQTVPDENVLAEHLVRKAAAIRALEKELIHDLQENEQYALFTDLELPLSSVLAEMEFTGVKVDVERLKEMGEELTEQLRQVEQEIYKLAGQRFNINSPKQLGVILFEKLQLPVLKKTKTGYSTSADVLEKLARQHEIVRKILHYRQLGKLQSTYIEGLLKVVHRDTHKVHTIFNQALTQTGRLSSTEPNLQNIPIRLEEGRKIRQAFVPSKPDWVIFSADYSQIELRVLAHLANDENLIDAFRHDLDIHTKTAMDIFHVTADEVTPNMRRLAKAVNFGIVYGISDYGLSQRLGITRKEAAEFIRRYFESFPGVKQYMENIVKEAKQKGYVTTLLHRRRYLPDIHSRNRNLRSFAERTAMNTPIQGSAADIIKKAMIDLADRLKREHLQARMLLQVHDELILEAPREEVERLVQIVPEVMENAIQLTVPLKVDYHYGPTWYDAK

SEQ ID NO: 443 - DNA, 1812 bp, synthetic construct
  misc_feature 1..1812: note = Variant of DNA polymerase
  source 1..1812: mol_type = other DNA
atgcatcaccatcaccatcacggtggcagcggtatggttgcaccacagaccaaaaaagaagaggccgtactgcctaacatcaattatacaattgtggaggaagtcaccgaaccgattctcgcggatcgttcggcgttagtggttgaggttctggggtccaactaccataaggctccgatcctgggctttgccctggccaatgagcacggtaacttcttcattcgcactgacacggctctttcttctccgctgtttaccgcgtggctggaggatgagagcaagaagaaatcagtattcgacgctaaacgcgcaatcgtggccctgaaatggaaaggcattgaattacgtggcatcgaatttgacttgttgctggcttcatatctcctgaatccctcgcagcgtacgccggatgtcgcaagcgtggccaagaccaaacagtacatggcagtacagagtgattgggcagtctatggaaaaggtgcgaaacaaacggtgccagatgaaaacgttttagccgaacatctggtgcgtaaagctgctgcaattcgcgccctggagaaagaactgatccacgatttgcaggaaaatgaacaatacgccctgtttactgaccttgaattacctctgtcctcggtcctggcagagatggaatttaccggtatgaaagtagatgttgaacgcctgaaagaaatgggcgaggagctcacagaacaactgcgccaagtggagcaggaaatctataagttagctggccaacgcttcaacattaacagccctaaacaactgggtgtcattctgtttgaaaaattacagcttcccgtcctgaagaagacgaagaccggctatagtacgagtgctgatgtgctcgagaaacttgcccgtcagcatgaaatcgtccgcaaaattcttcactaccgtcagctcggtaaactgcaatccacatatattgaagggctgctgaaagttgtacatcgcgacacccataaagtccacaccatcttcaaccaggccctgactcaaaccgggcgcctgtcaagcaccgaacctaatctccagaacatcccaattcgtctggaagaaggccgcaaaattcgccaagcatttgtgccatcgaaacctgactgggttatctttagcgcagattactcacagattgagctccgtgttctcgcacacctggcaaacgatgaaaatctgatcgatgcttttcgtcatgaccttgacatccatacgaagacagccatggatattttccatgtaacagcagatgaagttacccccaatatgcgtcgccaagcaaaagccgtgaacttcggtattgtctatgggatctctgattacggtctgagtcagcgtcttggcatcacgcgcaaagaagccgccgaatttattcgtcgttatttcgaaagctttcccggcgttaaacagtacatggagaatattgtaaaagaagccaaacagaaaggatacgtcaccacccttttacaccgccgccgctatctgccagacatccattctcgtaatcgcaacttacgttcattcgcagaacgcacggccatgaacaccccaattcaaggatcagccgccgacatcatcaagaaggcaatgattgatttagctgatcgtctgaaacgcgagcaccttcaagctcgtatgctgctccaggttcatgacgaactgattcttgaagctcctcgtgaggaagtcgaacgcctggttcaggttgtacccgaggtcatggagaacgccatccagttaaccgtcccactgaaagttgattatcactacggtcctacgtggtacgacgctaag

SEQ ID NO: 444 - protein, 604 aa, synthetic construct
  REGION 1..604: note = Variant of DNA polymerase
MHHHHHHGGSGMVAPQTKKEEAVLPNINYTIVEEVTEPILADRSALVVEVLGSNYHKAPILGFALANEHGNFFIRTDTALSSPLFTAWLEDESKKKSVFDAKRAIVALKWKGIELRGIEFDLLLASYLLNPSQRTPDVASVAKTKQYMAVQSDWAVYGKGAKQTVPDENVLAEHLVRKAAAIRALEKELIHDLQENEQYALFTDLELPLSSVLAEMEFTGMKVDVERLKEMGEELTEQLRQVEQEIYKLAGQRFNINSPKQLGVILFEKLQLPVLKKTKTGYSTSADVLEKLARQHEIVRKILHYRQLGKLQSTYIEGLLKVVHRDTHKVHTIFNQALTQTGRLSSTEPNLQNIPIRLEEGRKIRQAFVPSKPDWVIFSADYSQIELRVLAHLANDENLIDAFRHDLDIHTKTAMDIFHVTADEVTPNMRRQAKAVNFGIVYGISDYGLSQRLGITRKEAAEFIRRYFESFPGVKQYMENIVKEAKQKGYVTTLLHRRRYLPDIHSRNRNLRSFAERTAMNTPIQGSAADIIKKAMIDLADRLKREHLQARMLLQVHDELILEAPREEVERLVQVVPEVMENAIQLTVPLKVDYHYGPTWYDAK

SEQ ID NO: 445 - DNA, 1812 bp, synthetic construct
  misc_feature 1..1812: note = Variant of DNA polymerase
  source 1..1812: mol_type = other DNA
atgcatcaccatcaccatcacggtggcagcggtatggttgcaccacagaccaaaaaagaagaggccgtactgcctaacatcaattatacaattgtggaggaagtcaccgaaccgattctcgcggatcgttcggcgttagtggttgaggttctggggtccaactaccataaggctccgatcctgggctttgccctggccaatgagcacggtaacttcttcattcgcactgacacggctctttcttctccgctgtttaccgcgtggctggaggatgagagcaagaagaaatcagtattcgacgctaaacgcgcaatcgtggccctgaaatggaaaggcattgaattacgtggcatcgaatttgacttgttgctggcttcatatctcctgaatccctcgcagcgtacgccggatgtcgcaagcgtggccaagaccaaacagtacatggcagtacagagtgattgggcagtctatggaaaaggtgcgaaacaaacggtgccagatgaaaacgttttagccgaacatctggtgcgtaaagctgctgcaattcgcgccctggagaaagaactgatccacgatttgcaggaaaatgaacaatacgccctgtttactgaccttgaattacctctgtcctcggtcctggcagagatggaatttaccggtatgaaagtagatgttgaacgcctgaaagaaatgggcgaggagctcacagaacaactgcgccaagtggagcaggaaatctataagttagctggccaacgcttcaacattaacagccctaaacaactgggtgtcattctgtttgaaaaattacagcttcccgtcctgaagaagacgaagaccggctatagtacgagtgctgatgtgctcgagaaacttgcccgtcagcatgaaatcgtccgcaaaattcttcactaccgtcagctcggtaaactgcaatccacatatattgaagggctgctgaaagttgtacatcgcgacacccataaagtccacaccatcttcaaccaggccctgactcaaaccgggcgcctgtcaagcaccgaacctaatctccagaacatcccaattcgtctggaagaaggccgcaaaattcgccaagcatttgtgccatcgaaacctgactgggttatctttagcgcagattactcacagattgagctccgtgttctcgcacacctggcaaacgatgaaaatctgatcgatgcttttcgtcatgaccttgacatccatacgaagacagccatggatattttccatgtaacagcagatgaagttacccccaatatgcgtcgcctggcaaaagccgtgaacttcggtattgtctatgggatctctgattacggtctgagtcagcgtcttggcatcacgcgcaaagaagccgccgaatttattcgtcgttatttcgaaagctttcccggcgttaaacagtacatggagaatattgtaaaagaagccaaacagaaaggatacgtcaccacccttttacaccgccgccgctatctgccagacatccattctcgtaatcgcaacttacgttcattcgcagaacgcacggccatgaacaccccaattcaaggatcagccgccgacatcatcaagaaggcaatgattgatttagctgatcgtctgaaacgcgagcaccttcaagctcgtatgctgctccaggttcatgacgaactgattcttgaagctcctcgtgaggaagtcgaacgcctggttcagattgtacccgaggtcatggagaacgccatccagttaaccgtcccactgaaagttgattatcactacggtcctacgtggtacgacgctaag

SEQ ID NO: 446 - protein, 604 aa, synthetic construct
  REGION 1..604: note = Variant of DNA polymerase
MHHHHHHGGSGMVAPQTKKEEAVLPNINYTIVEEVTEPILADRSALVVEVLGSNYHKAPILGFALANEHGNFFIRTDTALSSPLFTAWLEDESKKKSVFDAKRAIVALKWKGIELRGIEFDLLLASYLLNPSQRTPDVASVAKTKQYMAVQSDWAVYGKGAKQTVPDENVLAEHLVRKAAAIRALEKELIHDLQENEQYALFTDLELPLSSVLAEMEFTGMKVDVERLKEMGEELTEQLRQVEQEIYKLAGQRFNINSPKQLGVILFEKLQLPVLKKTKTGYSTSADVLEKLARQHEIVRKILHYRQLGKLQSTYIEGLLKVVHRDTHKVHTIFNQALTQTGRLSSTEPNLQNIPIRLEEGRKIRQAFVPSKPDWVIFSADYSQIELRVLAHLANDENLIDAFRHDLDIHTKTAMDIFHVTADEVTPNMRRLAKAVNFGIVYGISDYGLSQRLGITRKEAAEFIRRYFESFPGVKQYMENIVKEAKQKGYVTTLLHRRRYLPDIHSRNRNLRSFAERTAMNTPIQGSAADIIKKAMIDLADRLKREHLQARMLLQVHDELILEAPREEVERLVQIVPEVMENAIQLTVPLKVDYHYGPTWYDAK

SEQ ID NO: 447 - DNA, 1812 bp, synthetic construct
  misc_feature 1..1812: note = Variant of DNA polymerase
  source 1..1812: mol_type = other DNA
atgcatcaccatcaccatcacggtggcagcggtatggttgcaccacagaccaaaaaagaagaggccgtaatgcctaacatcaattatacaattgtggaggaagtcaccgaaccgattctcgcggatcgttcggcgttagtggttgaggttctggggtccaactaccataagaagccgatcctgggctttgccctggccaatgagcacggtaacttcttcattcgcactgacacggctctttcttctccgctgtttaccgcgtggctggaggatgagagcaagaagaaatcagtattcgacgctaaacgcgcaatcgtggccctgaaatggaaaggcattgaataccgtggcatcgaatttgacttgttgctggcttcatatctcctgaatccctcgcagcgtacgccggatgtcgcaagcgtggccaagaccaaacagtacatggcagtacagagtgattgggcagtctatggaaaaggtgcgaaacaaacggtgccagatgaaaacgttttagccgaacatctggtgcgtaaagctgctgcaattcgcgccctggagaaagaactgatccacgatttgcaggaaaatgaacaatacgccctgtttactgaccttgaattacctctgtcctcggtcctggcagagatggaatttaccggtatgaaagtagatgttgaacgcctgaaagaaatgggcgaggagctcacagaacaactgcgccaagtggagcaggaaatctataagttagctggccaacgcttcaacattaacagccctaaacaactgggtgtcattctgtttgaaaaattacagcttcccgtcctgaagaagacgaagaccggctatagtacgagtgctgatgtgctcgagaaacttgcccgtcagcatgaaatcgtccgcaaaattcttcactaccgtcagctcggtaaactgcaatccacatatattgaagggctgctgaaagttgtacatcgcgacacccataaagtccacaccatcttcaaccaggccctgactcaaaccgggcgcctgtcaagcaccgaacctaatctccagaacatcccaattcgtctggaagaaggccgcaaaattcgccaagcatttgtgccatcgaaacctgactgggttatctttagcgcagattactcacagattgagctccgtgttctcgcacacctggcaaacgatgaaaatctgatcgatgcttttcgtcatgaccttgacatccatacgaagacagccatggatattttccatgtaacagcagatgaagttacccccaatatgcgtcgccaggcaaaagccgtgaacttcggtattgtctatgggatctctgattacggtctgagtcagcgtcttggcatcacgcgcaaagaagccgccgaatttattcgtcgttatttcgaaagctttcccggcgttaaacagtacatggagaatattgtaaaagaagccaaacagaaaggatacgtcaccacccttttacaccgccgccgctatctgccagacatccattctcgtaatcgcaacttacgttcattcgcagaacgcacggccatgaacaccccaattcaaggatcagccgccgacatcatcaagaaggcaatgattgatttagctgatcgtctgaaacgcgagcaccttcaagctcgtatgctgctccaggttcatgacgaactgattcttgaagctcctcgtgaggaagtcgaacgcctggttcaggttgtacccgaggtcatggagaacgccatccagttaaccgtcccactgaaagttgattatcactacggtcctacgtggtacgacgctaag

SEQ ID NO: 448 - protein, 604 aa, synthetic construct
  REGION 1..604: note = Variant of DNA polymerase
MHHHHHHGGSGMVAPQTKKEEAVMPNINYTIVEEVTEPILADRSALVVEVLGSNYHKKPILGFALANEHGNFFIRTDTALSSPLFTAWLEDESKKKSVFDAKRAIVALKWKGIEYRGIEFDLLLASYLLNPSQRTPDVASVAKTKQYMAVQSDWAVYGKGAKQTVPDENVLAEHLVRKAAAIRALEKELIHDLQENEQYALFTDLELPLSSVLAEMEFTGMKVDVERLKEMGEELTEQLRQVEQEIYKLAGQRFNINSPKQLGVILFEKLQLPVLKKTKTGYSTSADVLEKLARQHEIVRKILHYRQLGKLQSTYIEGLLKVVHRDTHKVHTIFNQALTQTGRLSSTEPNLQNIPIRLEEGRKIRQAFVPSKPDWVIFSADYSQIELRVLAHLANDENLIDAFRHDLDIHTKTAMDIFHVTADEVTPNMRRQAKAVNFGIVYGISDYGLSQRLGITRKEAAEFIRRYFESFPGVKQYMENIVKEAKQKGYVTTLLHRRRYLPDIHSRNRNLRSFAERTAMNTPIQGSAADIIKKAMIDLADRLKREHLQARMLLQVHDELILEAPREEVERLVQVVPEVMENAIQLTVPLKVDYHYGPTWYDAK

SEQ ID NO: 449 - DNA, 1812 bp, synthetic construct
  misc_feature 1..1812: note = Variant of DNA polymerase
  source 1..1812: mol_type = other DNA
atgcatcaccatcaccatcacggtggcagcggtatggttgcaccacagaccaaaaaagaagaggccgtaatgatgaacatcaattatacaattgtggaggaagtcaccgaaccgattctcgcggatcgttcggcgttagtggttgaggttctggggtccaactaccataaggctccgatcctgggctttgccctggccaatgagcacggtaacttcttcattcgcactgacacggctctttcttctccgctgtttaccgcgtggctggaggatgagagcaagaagaaatcagtattcgacgctaaacgcgcaatcgtggccctgaaatggaaaggcattgaattacgtggcatcgaatttgacttgttgctggcttcatatctcctgaatccctcgcagcgtacgccggatgtcgcaagcgtggccaagaccaaacagtacatggcagtacagagtgattgggcagtctatggaaaaggtgcgaaacaaacggtgccagatgaaaacgttttagccgaacatctggtgcgtaaagctgctgcaattcgcgccctggagaaagaactgatccacgatttgcaggaaaatgaacaatacgccctgtttactgaccttgaattacctctgtcctcggtcctggcagagatggaatttaccggtatgaaagtagatgttgaacgcctgaaagaaatgggcgaggagctcacagaacaactgcgccaagtggagcaggaaatctataagttagctggccaacgcttcaacattaacagccctaaacaactgggtgtcattctgtttgaaaaattacagcttcccgtcctgaagaagacgaagaccggctatagtacgagtgctgatgtgctcgagaaacttgcccgtcagcatgaaatcgtccgcaaaattcttcactaccgtcagctcggtaaactgcaatccacatatattgaagggctgctgaaagttgtacatcgcgacacccataaagtccacaccatcttcaaccaggccctgactcaaaccgggcgcctgtcaagcaccgaacctaatctccagaacatcccaattcgtctggaagaaggccgcaaaattcgccaagcatttgtgccatcgaaacctgactgggttatctttagcgcagattactcacagattgagctccgtgttctcgcacacctggcaaacgatgaaaatctgatcgatgcttttcgtcatgaccttgacatccatacgaagacagccatggatattttccatgtaacagcagatgaagttacccccaatatgcgtcgcctggcaaaagccgtgaacttcggtattgtctatgggatctctgattacggtctgagtcagcgtcttggcatcacgcgcaaagaagccgccgaatttattcgtcgttatttcgaaagctttcccggcgttaaacagtacatggagaatattgtaaaagaagccaaacagaaaggatacgtcaccacccttttacaccgccgccgctatctgccagacatccattctcgtaatcgcaacttacgttcattcgcagaacgcacggccatgaacaccccaattcaaggatcagccgccgacatcatcaagaaggcaatgattgatttagctgatcgtctgaaacgcgagcaccttcaagctcgtatgctgctccaggttcatgacgaactgattcttgaagctcctcgtgaggaagtcgaacgcctggttcaggttgtacccgaggtcatggagaacgccatccagttaaccgtcccactgaaagttgattatcactacggtcctacgtggtacgacgctaag

SEQ ID NO: 450 - protein, 604 aa, synthetic construct
  REGION 1..604: note = Variant of DNA polymerase
MHHHHHHGGSGMVAPQTKKEEAVMMNINYTIVEEVTEPILADRSALVVEVLGSNYHKAPILGFALANEHGNFFIRTDTALSSPLFTAWLEDESKKKSVFDAKRAIVALKWKGIELRGIEFDLLLASYLLNPSQRTPDVASVAKTKQYMAVQSDWAVYGKGAKQTVPDENVLAEHLVRKAAAIRALEKELIHDLQENEQYALFTDLELPLSSVLAEMEFTGMKVDVERLKEMGEELTEQLRQVEQEIYKLAGQRFNINSPKQLGVILFEKLQLPVLKKTKTGYSTSADVLEKLARQHEIVRKILHYRQLGKLQSTYIEGLLKVVHRDTHKVHTIFNQALTQTGRLSSTEPNLQNIPIRLEEGRKIRQAFVPSKPDWVIFSADYSQIELRVLAHLANDENLIDAFRHDLDIHTKTAMDIFHVTADEVTPNMRRLAKAVNFGIVYGISDYGLSQRLGITRKEAAEFIRRYFESFPGVKQYMENIVKEAKQKGYVTTLLHRRRYLPDIHSRNRNLRSFAERTAMNTPIQGSAADIIKKAMIDLADRLKREHLQARMLLQVHDELILEAPREEVERLVQVVPEVMENAIQLTVPLKVDYHYGPTWYDAK

SEQ ID NO: 451 - DNA, 1812 bp, synthetic construct
  misc_feature 1..1812: note = Variant of DNA polymerase
  source 1..1812: mol_type = other DNA
atgcatcaccatcaccatcacggtggcagcggtatggttgcaccacagaccaaaaaagaagaggccgtaatgatgaacatcaattatacaattgtggaggaagtcaccgaaccgattctcgcggatcgttcggcgttagtggttgaggttctggggtccaactaccataagaagccgatcctgggctttgccctggccaatgagcacggtaacttcttcattcgcactgacacggctctttcttctccgctgtttaccgcgtggctggaggatgagagcaagaagaaatcagtattcgacgctaaacgcgcaatcgtggccctgaaatggaaaggcattgaattacgtggcatcgaatttgacttgttgctggcttcatatctcctgaatccctcgcagcgtacgccggatgtcgcaagcgtggccaagaccaaacagtacatggcagtacagagtgattgggcagtctatggaaaaggtgcgaaacaaacggtgccagatgaaaacgttttagccgaacatctggtgcgtaaagctgctgcaattcgcgccctggagaaagaactgatccacgatttgcaggaaaatgaacaatacgccctgtttactgaccttgaattacctctgtcctcggtcctggcagagatggaatttaccggtatgaaagtagatgttgaacgcctgaaagaaatgggcgaggagctcacagaacaactgcgccaagtggagcaggaaatctataagttagctggccaacgcttcaacattaacagccctaaacaactgggtgtcattctgtttgaaaaattacagcttcccgtcctgaagaagacgaagaccggctatagtacgagtgctgatgtgctcgagaaacttgcccgtcagcatgaaatcgtccgcaaaattcttcactaccgtcagctcggtaaactgcaatccacatatattgaagggctgctgaaagttgtacatcgcgacacccataaagtccacaccatcttcaaccaggccctgactcaaaccgggcgcctgtcaagcaccgaacctaatctccagaacatcccaattcgtctggaagaaggccgcaaaattcgccaagcatttgtgccatcgaaacctgactgggttatctttagcgcagattactcacagattgagctccgtgttctcgcacacctggcaaacgatgaaaatctgatcgatgcttttcgccatgaccttgacatccatacgaagacagccatggatattttccatgtaacagcagatgaagttacccccaatatgcgtcgcctggcaaaagccgtgaacttcggtattgtctatgggatctctgattacggtctgagtcagcgtcttggcatcacgcgcaaagaagccgccgaatttattcgtcgttatttcgaaagctttcccggcgttaaacagtacatggagaatattgtaaaagaagccaaacagaaaggatacgtcaccacccttttacaccgccgccgctatctgccagacatccattctcgtaatcgcaacttacgttcattcgcagaacgcacggccatgaacaccccaattcaaggatcagccgccgacatcatcaagaaggcaatgattgatttagctgatcgtctgaaacgcgagcaccttcaagctcgtatgctgctccaggttcatgacgaactgattcttgaagctcctcgtgaggaagtcgaacgcctggttcagattgtacccgaggtcatggagaacgccatccagttaaccgtcccactgaaagttgattatcactacggtcctacgtggtacgacgctaag

SEQ ID NO: 452 - protein, 604 aa, synthetic construct
  REGION 1..604: note = Variant of DNA polymerase
MHHHHHHGGSGMVAPQTKKEEAVMMNINYTIVEEVTEPILADRSALVVEVLGSNYHKKPILGFALANEHGNFFIRTDTALSSPLFTAWLEDESKKKSVFDAKRAIVALKWKGIELRGIEFDLLLASYLLNPSQRTPDVASVAKTKQYMAVQSDWAVYGKGAKQTVPDENVLAEHLVRKAAAIRALEKELIHDLQENEQYALFTDLELPLSSVLAEMEFTGMKVDVERLKEMGEELTEQLRQVEQEIYKLAGQRFNINSPKQLGVILFEKLQLPVLKKTKTGYSTSADVLEKLARQHEIVRKILHYRQLGKLQSTYIEGLLKVVHRDTHKVHTIFNQALTQTGRLSSTEPNLQNIPIRLEEGRKIRQAFVPSKPDWVIFSADYSQIELRVLAHLANDENLIDAFRHDLDIHTKTAMDIFHVTADEVTPNMRRLAKAVNFGIVYGISDYGLSQRLGITRKEAAEFIRRYFESFPGVKQYMENIVKEAKQKGYVTTLLHRRRYLPDIHSRNRNLRSFAERTAMNTPIQGSAADIIKKAMIDLADRLKREHLQARMLLQVHDELILEAPREEVERLVQIVPEVMENAIQLTVPLKVDYHYGPTWYDAK

SEQ ID NO: 453 - DNA, 1812 bp, synthetic construct
  misc_feature 1..1812: note = Variant of DNA polymerase
  source 1..1812: mol_type = other DNA
atgcatcaccatcaccatcacggtggcagcggtatggttgcaccacagaccaaaaaagaagaggccgtactgcctaacatcaattatacaattgtggaggacgtcaccgaaccgattctcgcggatcgttcggcgttagtggttgaggttctggggtccaactaccataagaagccgatcctgggctttgccctggccaatgagcacggtaacttcttcattcgcactgacacggctctttcttctccgctgtttaccgcgtggctggaggatgagagcaagaagaaatcagtattcgacgctaaacgcgcaagcgtggccctgaaatggaaaggcattgaattacgtggcatcgaatttgacttgttgctggcttcatatctcctgaatccctcgcagcgtacgccggatgtcgcaagcgtggccaagaccaaacagtacatggcagtacagagtgattgggcagtctatggaaaaggtgcgaaacaaacggtgccagatgaaaacgttttagccgaacatctggtgcgtaaagctgctgcaattcgcgccctggagaaagaactgatccacgatttgcaggaaaatgaacaatacgccctgtttactgaccttgaattacctctgtcctcggtcctggcagagatggaatttaccggtgtgaaagtagatgttgaacgcctgaaagaaatgggcgaggagctcacagaacaactgcgccaagtggagcaggaaatctataagttagctggccaacgcttcaacattaacagccctaaacaactgggtgtcattctgtttgaaaaattacagcttcccgtcctgaagaagacgaagaccggctatagtacgagtgctgatgtgctcgagaaacttgcccgtcagcatgaaatcgtccgcaaaattcttcactaccgtcagctcggtaaactgcaatccacatatattgaagggctgctgaaagttgtacatcgcgacacccataaagtccacaccatcttcaaccaggccctgactcaaaccgggcgcctgtcaagcaccgaacctaatctccagaacatcccaattcgtctggaagaaggccgcaaaattcgccaagcatttgtgccatcgaaacctgactgggttatctttagcgcagattactcacagattgagctccgtgttctcgcacacctggcaaacgatgaaaatctgatcgatgcttttcgtcatgaccttgacatccatacgaagacagccatggatattttccatgtaacagcagatgaagttacccccaatatgcgtcgcctggcaaaagccgtgaacttcggtattgtctatgggatctctgattacggtctgagtcagcgtcttggcatcacgcgcaaagaagccgccgaatttattcgtcgttatttcgaaagctttcccggcgttaaacagtacatggagaatattgtaaaagaagccaaacagaaaggatacgtcaccacccttttacaccgccgccgctatctgccagacatccattctcgtaatcgcaacttacgttcattcgcagaacgcacggccatgaacaccccaattcaaggatcagccgccgacatcatcaagaaggcaatgattgatttagctgatcgtctgaaacgcgagcaccttcaagctcgtatgctgctccaggttcatgacgaactgattcttgaagctcctcgtgaggaagtcgaacgcctggttcagattgtacccgaggtcatggagaacgccatccagttaaccgtcccactgaaagttgattatcactacggtcctacgtggtacgacgctaag

SEQ ID NO: 454 - protein, 604 aa, synthetic construct
  REGION 1..604: note = Variant of DNA polymerase
MHHHHHHGGSGMVAPQTKKEEAVLPNINYTIVEDVTEPILADRSALVVEVLGSNYHKKPILGFALANEHGNFFIRTDTALSSPLFTAWLEDESKKKSVFDAKRASVALKWKGIELRGIEFDLLLASYLLNPSQRTPDVASVAKTKQYMAVQSDWAVYGKGAKQTVPDENVLAEHLVRKAAAIRALEKELIHDLQENEQYALFTDLELPLSSVLAEMEFTGVKVDVERLKEMGEELTEQLRQVEQEIYKLAGQRFNINSPKQLGVILFEKLQLPVLKKTKTGYSTSADVLEKLARQHEIVRKILHYRQLGKLQSTYIEGLLKVVHRDTHKVHTIFNQALTQTGRLSSTEPNLQNIPIRLEEGRKIRQAFVPSKPDWVIFSADYSQIELRVLAHLANDENLIDAFRHDLDIHTKTAMDIFHVTADEVTPNMRRLAKAVNFGIVYGISDYGLSQRLGITRKEAAEFIRRYFESFPGVKQYMENIVKEAKQKGYVTTLLHRRRYLPDIHSRNRNLRSFAERTAMNTPIQGSAADIIKKAMIDLADRLKREHLQARMLLQVHDELILEAPREEVERLVQIVPEVMENAIQLTVPLKVDYHYGPTWYDAK

SEQ ID NO: 455 - DNA, 1812 bp, synthetic construct
  misc_feature 1..1812: note = Variant of DNA polymerase
  source 1..1812: mol_type = other DNA
atgcatcaccatcaccatcacggtggcagcggtatggttgcaccacagaccaaaaaagaagaggccgtaatgatgaacatcaattatacaattgtggaggaagtcaccgaaccgattctcgcggatcgttcggcgttagtggttgaggttctggggtccaactaccataaggctccgatcctgggctttgccctggccaatgagcacggtaacttcttcattcgcactgacacggctctttcttctccgctgtttaccgcgtggctggaggatgagagcaagaagaaatcagtattcgacgctaaacgcgcaatcgtggccctgaaatggaaaggcattgaataccgtggcatcgaatttgacttgttgctggcttcatatctcctgaatccctcgcagcgtacgccggatgtcgcaagcgtggccaagaccaaacagtacatggcagtacagagtgattgggcagtctatggaaaaggtgcgaaacaaacggtgccagatgaaaacgttttagccgaacatctggtgcgtaaagctgctgcaattcgcgccctggagaaagaactgatccacgatttgcaggaaaatgaacaatacgccctgtttactgaccttgaattacctctgtcctcggtcctggcagagatggaatttaccggtgtgaaagtagatgttgaacgcctgaaagaaatgggcgaggagctcacagaacaactgcgccaagtggagcaggaaatctataagttagctggccaacgcttcaacattaacagccctaaacaactgggtgtcattctgtttgaaaaattacagcttcccgtcctgaagaagacgaagaccggctatagtacgagtgctgatgtgctcgagaaacttgcccgtcagcatgaaatcgtccgcaaaattcttcactaccgtcagctcggtaaactgcaatccacatatattgaagggctgctgaaagttgtacatcgcgacacccataaagtccacaccatcttcaaccaggccctgactcaaaccgggcgcctgtcaagcaccgaacctaatctccagaacatcccaattcgtctggaagaaggccgcaaaattcgccaagcatttgtgccatcgaaacctgactgggttatctttagcgcagattactcacagattgagctccgtgttctcgcacacctggcaaacgatgaaaatctgatcgatgcttttcgtcatgaccttgacatccatacgaagacagccatggatattttccatgtaacagcagatgaagttacccccaatatgcgtcgcctggcaaaagccgtgaacttcggtattgtctatgggatctctgattacggtctgagtcagcgtcttggcatcacgcgcaaagaagccgccgaatttattcgtcgttatttcgaaagctttcccggcgttaaacagtacatggagaatattgtaaaagaagccaaacagaaaggatacgtcaccacccttttacaccgccgccgctatctgccagacatccattctcgtaatcgcaacttacgttcattcgcagaacgcacggccatgaacaccccaattcaaggatcagccgccgacatcatcaagaaggcaatgattgatttagctgatcgtctgaaacgcgagcaccttcaagctcgtatgctgctccaggttcatgacgaactgattcttgaagctcctcgtgaggaagtcgaacgcctggttcagattgtacccgaggtcatggagaacgccatccagttaaccgtcccactgaaagttgattatcactacggtcctacgtggtacgacgctaag

SEQ ID NO: 456 - protein, 604 aa, synthetic construct
  REGION 1..604: note = Variant of DNA polymerase
MHHHHHHGGSGMVAPQTKKEEAVMMNINYTIVEEVTEPILADRSALVVEVLGSNYHKAPILGFALANEHGNFFIRTDTALSSPLFTAWLEDESKKKSVFDAKRAIVALKWKGIEYRGIEFDLLLASYLLNPSQRTPDVASVAKTKQYMAVQSDWAVYGKGAKQTVPDENVLAEHLVRKAAAIRALEKELIHDLQENEQYALFTDLELPLSSVLAEMEFTGVKVDVERLKEMGEELTEQLRQVEQEIYKLAGQRFNINSPKQLGVILFEKLQLPVLKKTKTGYSTSADVLEKLARQHEIVRKILHYRQLGKLQSTYIEGLLKVVHRDTHKVHTIFNQALTQTGRLSSTEPNLQNIPIRLEEGRKIRQAFVPSKPDWVIFSADYSQIELRVLAHLANDENLIDAFRHDLDIHTKTAMDIFHVTADEVTPNMRRLAKAVNFGIVYGISDYGLSQRLGITRKEAAEFIRRYFESFPGVKQYMENIVKEAKQKGYVTTLLHRRRYLPDIHSRNRNLRSFAERTAMNTPIQGSAADIIKKAMIDLADRLKREHLQARMLLQVHDELILEAPREEVERLVQIVPEVMENAIQLTVPLKVDYHYGPTWYDAK

SEQ ID NO: 457 - DNA, 1812 bp, synthetic construct
  misc_feature 1..1812: note = Variant of DNA polymerase
  source 1..1812: mol_type = other DNA
atgcatcaccatcaccatcacggtggcagcggtatggttgcaccacagaccaaaaaagaagaggccgtaatgcctaacatcaattatacaattgtggaggaagtcaccgaaccgattctcgcggatcgttcggcgttagtggttgaggttctggggtccaactaccataaggctccgatcctgggctttgccctggccaatgagcacggtaacttcttcattcgcactgacacggctctttcttctccgctgtttaccgcgtggctggaggatgagagcaagaagaaatcagtattcgacgctaaacgcgcaatcgtggccctgaaatggaaaggcattgaattacgtggcatcgaatttgacttgttgctggcttcatatctcctgaatccctcgcagcgtacgccggatgtcgcaagcgtggccaagaccaaacagtacatggcagtacagagtgattgggcagtctatggaaaaggtgcgaaacaaacggtgccagatgaaaacgttttagccgaacatctggtgcgtaaagctgctgcaattcgcgccctggagaaagaactgatccacgatttgcaggaaaatgaacaatacgccctgtttactgaccttgaattacctctgtcctcggtcctggcagagatggaatttaccggtatgaaagtagatgttgaacgcctgaaagaaatgggcgaggagctcacagaacaactgcgccaagtggagcaggaaatctataagttagctggccaacgcttcaacattaacagccctaaacaactgggtgtcattctgtttgaaaaattacagcttcccgtcctgaagaagacgaagaccggctatagtacgagtgctgatgtgctcgagaaacttgcccgtcagcatgaaatcgtccgcaaaattcttcactaccgtcagctcggtaaactgcaatccacatatattgaagggctgctgaaagttgtacatcgcgacacccataaagtccacaccatcttcaaccaggccctgactcaaaccgggcgcctgtcaagcaccgaacctaatctccagaacatcccaattcgtctggaagaaggccgcaaaattcgccaagcatttgtgccatcgaaacctgactgggttatctttagcgcagattactcacagattgagctccgtgttctcgcacacctggcaaacgatgaaaatctgatcgatgcttttcgtcatgaccttgacatccatacgaagacagccatggatattttccatgtaacagcagatgaagttacccccaatatgcgtcgccaggcaaaagccgtgaacttcggtattgtctatgggatctctgattacggtctgagtcagcgtcttggcatcacgcgcaaagaagccgccgaatttattcgtcgttatttcgaaagctttcccggcgttaaacagtacatggagaatattgtaaaagaagccaaacagaaaggatacgtcaccacccttttacaccgccgccgctatctgccagacatccattctcgtaatcgcaacttacgttcattcgcagaacgcacggccatgaacaccccaattcaaggatcagccgccgacatcatcaagaaggcaatgattgatttagctgatcgtctgaaacgcgagcaccttcaagctcgtatgctgctccaggttcatgacgaactgattcttgaagctcctcgtgaggaagtcgaacgcctggttcaggttgtacccgaggtcatggagaacgccatccagttaaccgtcccactgaaagttgattatcactacggtcctacgtggtacgacgctaag

SEQ ID NO: 458 - protein, 604 aa, synthetic construct
  REGION 1..604: note = Variant of DNA polymerase
MHHHHHHGGSGMVAPQTKKEEAVMPNINYTIVEEVTEPILADRSALVVEVLGSNYHKAPILGFALANEHGNFFIRTDTALSSPLFTAWLEDESKKKSVFDAKRAIVALKWKGIELRGIEFDLLLASYLLNPSQRTPDVASVAKTKQYMAVQSDWAVYGKGAKQTVPDENVLAEHLVRKAAAIRALEKELIHDLQENEQYALFTDLELPLSSVLAEMEFTGMKVDVERLKEMGEELTEQLRQVEQEIYKLAGQRFNINSPKQLGVILFEKLQLPVLKKTKTGYSTSADVLEKLARQHEIVRKILHYRQLGKLQSTYIEGLLKVVHRDTHKVHTIFNQALTQTGRLSSTEPNLQNIPIRLEEGRKIRQAFVPSKPDWVIFSADYSQIELRVLAHLANDENLIDAFRHDLDIHTKTAMDIFHVTADEVTPNMRRQAKAVNFGIVYGISDYGLSQRLGITRKEAAEFIRRYFESFPGVKQYMENIVKEAKQKGYVTTLLHRRRYLPDIHSRNRNLRSFAERTAMNTPIQGSAADIIKKAMIDLADRLKREHLQARMLLQVHDELILEAPREEVERLVQVVPEVMENAIQLTVPLKVDYHYGPTWYDAK

SEQ ID NO: 459 - DNA, 1812 bp, synthetic construct
  misc_feature 1..1812: note = Variant of DNA polymerase
  source 1..1812: mol_type = other DNA
atgcatcaccatcaccatcacggtggcagcggtatggttgcaccacagaccaaaaaagaagaggccgtactgcctaacatcaattatacaattgtggaggaagtcaccgaaccgattctcgcggatcgttcggcgttagtggttgaggttctggggtccaactaccataaggctccgatcctgggctttgccctggccaatgagcacggtaacttcttcattcgcactgacacggctctttcttctccgctgtttaccgcgtggctggaggatgagagcaagaagaaatcagtattcgacgctaaacgcgcaatcgtggccctgaaatggaaaggcattgaataccgtggcatcgaatttgacttgttgctggcttcatatctcctgaatccctcgcagcgtacgccggatgtcgcaagcgtggccaagaccaaacagtacatggcagtacagagtgattgggcagtctatggaaaaggtgcgaaacaaacggtgccagatgaaaacgttttagccgaacatctggtgcgtaaagctgctgcaattcgcgccctggagaaagaactgatccacgatttgcaggaaaatgaacaatacgccctgtttactgaccttgaattacctctgtcctcggtcctggcagagatggaatttaccggtgtgaaagtagatgttgaacgcctgaaagaaatgggcgaggagctcacagaacaactgcgccaagtggagcaggaaatctataagttagctggccaacgcttcaacattaacagccctaaacaactgggtgtcattctgtttgaaaaattacagcttcccgtcctgaagaagacgaagaccggctatagtacgagtgctgatgtgctcgagaaacttgcccgtcagcatgaaatcgtccgcaaaattcttcactaccgtcagctcggtaaactgcaatccacatatattgaagggctgctgaaagttgtacatcgcgacacccataaagtccacaccatcttcaaccaggccctgactcaaaccgggcgcctgtcaagcaccgaacctaatctccagaacatcccaattcgtctggaagaaggccgcaaaattcgccaagcatttgtgccatcgaaacctgactgggttatctttagcgcagattactcacagattgagctccgtgttctcgcacacctggcaaacgatgaaaatctgatcgatgcttttcgtcatgaccttgacatccatacgaagacagccatggatattttccatgtaacagcagatgaagttacccccaatatgcgtcgcctggcaaaagccgtgaacttcggtattgtctatgggatctctgattacggtctgagtcagcgtcttggcatcacgcgcaaagaagccgccgaatttattcgtcgttatttcgaaagctttcccggcgttaaacagtacatggagaatattgtaaaagaagccaaacagaaaggatacgtcaccacccttttacaccgccgccgctatctgccagacatccattctcgtaatcgcaacttacgttcattcgcagaacgcacggccatgaacaccccaattcaaggatcagccgccgacatcatcaagaaggcaatgattgatttagctgatcgtctgaaacgcgagcaccttcaagctcgtatgctgctccaggttcatgacgaactgattcttgaagctcctcgtgaggaagtcgaacgcctggttcagattgtacccgaggtcatggagaacgccatccagttaaccgtcccactgaaagttgattatcactacggtcctacgtggtacgacgctaag

SEQ ID NO: 460 - protein, 604 aa, synthetic construct
  REGION 1..604: note = Variant of DNA polymerase
MHHHHHHGGSGMVAPQTKKEEAVLPNINYTIVEEVTEPILADRSALVVEVLGSNYHKAPILGFALANEHGNFFIRTDTALSSPLFTAWLEDESKKKSVFDAKRAIVALKWKGIEYRGIEFDLLLASYLLNPSQRTPDVASVAKTKQYMAVQSDWAVYGKGAKQTVPDENVLAEHLVRKAAAIRALEKELIHDLQENEQYALFTDLELPLSSVLAEMEFTGVKVDVERLKEMGEELTEQLRQVEQEIYKLAGQRFNINSPKQLGVILFEKLQLPVLKKTKTGYSTSADVLEKLARQHEIVRKILHYRQLGKLQSTYIEGLLKVVHRDTHKVHTIFNQALTQTGRLSSTEPNLQNIPIRLEEGRKIRQAFVPSKPDWVIFSADYSQIELRVLAHLANDENLIDAFRHDLDIHTKTAMDIFHVTADEVTPNMRRLAKAVNFGIVYGISDYGLSQRLGITRKEAAEFIRRYFESFPGVKQYMENIVKEAKQKGYVTTLLHRRRYLPDIHSRNRNLRSFAERTAMNTPIQGSAADIIKKAMIDLADRLKREHLQARMLLQVHDELILEAPREEVERLVQIVPEVMENAIQLTVPLKVDYHYGPTWYDAK

SEQ ID NO: 461 - DNA, 1812 bp, synthetic construct
  misc_feature 1..1812: note = Variant of DNA polymerase
  source 1..1812: mol_type = other DNA
atgcatcaccatcaccatcacggtggcagcggtatggttgcaccacagaccaaaaaagaagaggccgtactgcctaacatcaattatacaattgtggaggaagtcaccgaaccgattctcgcggatcgttcggcgttagtggttgaggttctggggtccaactaccataagaagccgatcctgggctttgccctggccaatgagcacggtaacttcttcattcgcactgacacggctctttcttctccgctgtttaccgcgtggctggaggatgagagcaagaagaaatcagtattcgacgctaaacgcgcaatcgtggccctgaaatggaaaggcattgaattacgtggcatcgaatttgacttgttgctggcttcatatctcctgaatccctcgcagcgtacgccggatgtcgcaagcgtggccaagaccaaacagtacatggcagtacagagtgattgggcagtctatggaaaaggtgcgaaacaaacggtgccagatgaaaacgttttagccgaacatctggtgcgtaaagctgctgcaattcgcgccctggagaaagaactgatccacgatttgcaggaaaatgaacaatacgccctgtttactgaccttgaattacctctgtcctcggtcctggcagagatggaatttaccggtatgaaagtagatgttgaacgcctgaaagaaatgggcgaggagctcacagaacaactgcgccaagtggagcaggaaatctataagttagctggccaacgcttcaacattaacagccctaaacaactgggtgtcattctgtttgaaaaattacagcttcccgtcctgaagaagacgaagaccggctatagtacgagtgctgatgtgctcgagaaacttgcccgtcagcatgaaatcgtccgcaaaattcttcactaccgtcagctcggtaaactgcaatccacatatattgaagggctgctgaaagttgtacatcgcgacacccataaagtccacaccatcttcaaccaggccctgactcaaaccgggcgcctgtcaagcaccgaacctaatctccagaacatcccaattcgtctggaagaaggccgcaaaattcgccaagcatttgtgccatcgaaacctgactgggttatctttagcgcagattactcacagattgagctccgtgttctcgcacacctggcaaacgatgaaaatctgatcgatgcttttcgtcatgaccttgacatccatacgaagacagccatggatattttccatgtaacagcagatgaagttacccccaatatgcgtcgccaggcaaaagccgtgaacttcggtattgtctatgggatctctgattacggtctgagtcagcgtcttggcatcacgcgcaaagaagccgccgaatttattcgtcgttatttcgaaagctttcccggcgttaaacagtacatggagaatattgtaaaagaagccaaacagaaaggatacgtcaccacccttttacaccgccgccgctatctgccagacatccattctcgtaatcgcaacttacgttcattcgcagaacgcacggccatgaacaccccaattcaaggatcagccgccgacatcatcaagaaggcaatgattgatttagctgatcgtctgaaacgcgagcaccttcaagctcgtatgctgctccaggttcatgacgaactgattcttgaagctcctcgtgaggaagtcgaacgcctggttcagattgtacccgaggtcatggagaacgccatccagttaaccgtcccactgaaagttgattatcactacggtcctacgtggtacgacgctaag

SEQ ID NO: 462 - protein, 604 aa, synthetic construct
  REGION 1..604: note = Variant of DNA polymerase
MHHHHHHGGSGMVAPQTKKEEAVLPNINYTIVEEVTEPILADRSALVVEVLGSNYHKKPILGFALANEHGNFFIRTDTALSSPLFTAWLEDESKKKSVFDAKRAIVALKWKGIELRGIEFDLLLASYLLNPSQRTPDVASVAKTKQYMAVQSDWAVYGKGAKQTVPDENVLAEHLVRKAAAIRALEKELIHDLQENEQYALFTDLELPLSSVLAEMEFTGMKVDVERLKEMGEELTEQLRQVEQEIYKLAGQRFNINSPKQLGVILFEKLQLPVLKKTKTGYSTSADVLEKLARQHEIVRKILHYRQLGKLQSTYIEGLLKVVHRDTHKVHTIFNQALTQTGRLSSTEPNLQNIPIRLEEGRKIRQAFVPSKPDWVIFSADYSQIELRVLAHLANDENLIDAFRHDLDIHTKTAMDIFHVTADEVTPNMRRQAKAVNFGIVYGISDYGLSQRLGITRKEAAEFIRRYFESFPGVKQYMENIVKEAKQKGYVTTLLHRRRYLPDIHSRNRNLRSFAERTAMNTPIQGSAADIIKKAMIDLADRLKREHLQARMLLQVHDELILEAPREEVERLVQIVPEVMENAIQLTVPLKVDYHYGPTWYDAK

SEQ ID NO: 463 - DNA, 1812 bp, synthetic construct
  misc_feature 1..1812: note = Variant of DNA polymerase
  source 1..1812: mol_type = other DNA
atgcatcaccatcaccatcacggtggcagcggtatggttgcaccacagaccaaaaaagaagaggccgtactgccgaacatcaattatacaattgtggaggaagtcaccgaaccgattctcgcggatcgttcggcgttagtggttgaggttctggggtccaactaccataagaagccgatcctgggctttgccctggccaatgagcacggtaacttcttcattcgcactgacacggctctttcttctccgctgtttaccgcgtggctggaggatgagagcaagaagaaatcagtattcgacgctaaacgcgcaatcgtggccctgaaatggaaaggcattgaattacgtggcatcgaatttgacttgttgctggcttcatatctcctgaatccctcgcagcgtacgccggatgtcgcaagcgtggccaagaccaaacagtacatggcagtacagagtgattgggcagtctatggaaaaggtgcgaaacaaacggtgccagatgaaaacgttttagccgaacatctggtgcgtaaagctgctgcaattcgcgccctggagaaagaactgatccacgatttgcaggaaaatgaacaatacgccctgtttactgaccttgaattacctctgtcctcggtcctggcagagatggaatttaccggtgtgaaagtagatgttgaacgcctgaaagaaatgggcgaggagctcacagaacaactgcgccaagtggagcaggaaatctataagttagctggccaacgcttcaacattaacagccctaaacaactgggtgtcattctgtttgaaaaattacagcttcccgtcctgaagaagacgaagaccggctatagtacgagtgctgatgtgctcgagaaacttgcccgtcagcatgaaatcgtccgcaaaattcttcactaccgtcagctcggtaaactgcaatccacatatattgaagggctgctgaaagttgtacatcgcgacacccataaagtccacaccatcttcaaccaggccctgactcaaaccgggcgcctgtcaagcaccgaacctaatctccagaacatcccaattcgtctggaagaaggccgcaaaattcgccaagcatttgtgccatcgaaacctgactgggttatctttagcgcagattactcacagattgagctccgtgttctcgcacacctggcaaacgatgaaaatctgatcgatgcttttcgtcatgaccttgacatccatacgaagacagccatggatattttccatgtaacagcagatgaagttacccccaatatgcgtcgccaagcaaaagccgtgaacttcggtattgtctatgggatctctgattacggtctgagtcagcgtcttggcatcacgcgcaaagaagccgccgaatttattcgtcgttatttcgaaagctttcccggcgttaaacagtacatggagaatattgtaaaagaagccaaacagaaaggatacgtcaccacccttttacaccgccgccgctatctgccagacatccattctcgtaatcgcaacttacgttcattcgcagaacgcacggccatgaacaccccaattcaaggatcagccgccgacatcatcaagaaggcaatgattgatttagctgatcgtctgaaacgcgagcaccttcaagctcgtatgctgctccaggttcatgacgaactgattcttgaagctcctcgtgaggaagtcgaacgcctggttcaggttgtacccgaggtcatggagaacgccatccagttaaccgtcccactgaaagttgattatcactacggtcctacgtggtacgacgctaag

SEQ ID NO: 464 - protein, 604 aa, synthetic construct
  REGION 1..604: note = Variant of DNA polymerase
MHHHHHHGGSGMVAPQTKKEEAVLPNINYTIVEEVTEPILADRSALVVEVLGSNYHKKPILGFALANEHGNFFIRTDTALSSPLFTAWLEDESKKKSVFDAKRAIVALKWKGIELRGIEFDLLLASYLLNPSQRTPDVASVAKTKQYMAVQSDWAVYGKGAKQTVPDENVLAEHLVRKAAAIRALEKELIHDLQENEQYALFTDLELPLSSVLAEMEFTGVKVDVERLKEMGEELTEQLRQVEQEIYKLAGQRFNINSPKQLGVILFEKLQLPVLKKTKTGYSTSADVLEKLARQHEIVRKILHYRQLGKLQSTYIEGLLKVVHRDTHKVHTIFNQALTQTGRLSSTEPNLQNIPIRLEEGRKIRQAFVPSKPDWVIFSADYSQIELRVLAHLANDENLIDAFRHDLDIHTKTAMDIFHVTADEVTPNMRRQAKAVNFGIVYGISDYGLSQRLGITRKEAAEFIRRYFESFPGVKQYMENIVKEAKQKGYVTTLLHRRRYLPDIHSRNRNLRSFAERTAMNTPIQGSAADIIKKAMIDLADRLKREHLQARMLLQVHDELILEAPREEVERLVQVVPEVMENAIQLTVPLKVDYHYGPTWYDAK

SEQ ID NO: 465 - DNA, 1812 bp, synthetic construct
  misc_feature 1..1812: note = Variant of DNA polymerase
  source 1..1812: mol_type = other DNA
atgcatcaccatcaccatcacggtggcagcggtatggttgcaccacagaccaaaaaagaagaggccgtactgctgaacatcaattatacaattgtggaggaagtcaccgaaccgattctcgcggatcgttcggcgttagtggttgaggttctggggtccaactaccataaggctccgatcctgggctttgccctggccaatgagcacggtaacttcttcattcgcactgacacggctctttcttctccgctgtttaccgcgtggctggaggatgagagcaagaagaaatcagtattcgacgctaaacgcgcaatcgtggccctgaaatggaaaggcattgaattacgtggcatcgaatttgacttgttgctggcttcatatctcctgaatccctcgcagcgtacgccggatgtcgcaagcgtggccaagaccaaacagtacatggcagtacagagtgattgggcagtctatggaaaaggtgcgaaacaaacggtgccagatgaaaacgttttagccgaacatctggtgcgtaaagctgctgcaattcgcgccctggagaaagaactgatccacgatttgcaggaaaatgaacaatacgccctgtttactgaccttgaattacctctgtcctcggtcctggcagagatggaatttaccggtgtgaaagtagatgttgaacgcctgaaagaaatgggcgaggagctcacagaacaactgcgccaagtggagcaggaaatctataagttagctggccaacgcttcaacattaacagccctaaacaactgggtgtcattctgtttgaaaaattacagcttcccgtcctgaagaagacgaagaccggctatagtacgagtgctgatgtgctcgagaaacttgcccgtcagcatgaaatcgtccgcaaaattcttcactaccgtcagctcggtaaactgcaatccacatatattgaagggctgctgaaagttgtacatcgcgacacccataaagtccacaccatcttcaaccaggccctgactcaaaccgggcgcctgtcaagcaccgaacctaatctccagaacatcccaattcgtctggaagaaggccgcaaaattcgccaagcatttgtgccatcgaaacctgactgggttatctttagcgcagattactcacagattgagctccgtgttctcgcacacctggcaaacgatgaaaatctgatcgatgcttttcgtcatgaccttgacatccatacgaagacagccatggatattttccatgtaacagcagatgaagttacccccaatatgcgtcgcctggcaaaagccgtgaacttcggtattgtctatgggatctctgattacggtctgagtcagcgtcttggcatcacgcgcaaagaagccgccgaatttattcgtcgttatttcgaaagctttcccggcgttaaacagtacatggagaatattgtaaaagaagccaaacagaaaggatacgtcaccacccttttacaccgccgccgctatctgccagacatccattctcgtaatcgcaacttacgttcattcgcagaacgcacggccatgaacaccccaattcaaggatcagccgccgacatcatcaagaaggcaatgattgatttagctgatcgtctgaaacgcgagcaccttcaagctcgtatgctgctccaggttcatgacgaactgattcttgaagctcctcgtgaggaagtcgaacgcctggttcaggttgtacccgaggtcatggagaacgccatccagttaaccgtcccactgaaagttgattatcactacggtcctacgtggtacgacgctaag

SEQ ID NO: 466 - protein, 604 aa, synthetic construct
  REGION 1..604: note = Variant of DNA polymerase
MHHHHHHGGSGMVAPQTKKEEAVLLNINYTIVEEVTEPILADRSALVVEVLGSNYHKAPILGFALANEHGNFFIRTDTALSSPLFTAWLEDESKKKSVFDAKRAIVALKWKGIELRGIEFDLLLASYLLNPSQRTPDVASVAKTKQYMAVQSDWAVYGKGAKQTVPDENVLAEHLVRKAAAIRALEKELIHDLQENEQYALFTDLELPLSSVLAEMEFTGVKVDVERLKEMGEELTEQLRQVEQEIYKLAGQRFNINSPKQLGVILFEKLQLPVLKKTKTGYSTSADVLEKLARQHEIVRKILHYRQLGKLQSTYIEGLLKVVHRDTHKVHTIFNQALTQTGRLSSTEPNLQNIPIRLEEGRKIRQAFVPSKPDWVIFSADYSQIELRVLAHLANDENLIDAFRHDLDIHTKTAMDIFHVTADEVTPNMRRLAKAVNFGIVYGISDYGLSQRLGITRKEAAEFIRRYFESFPGVKQYMENIVKEAKQKGYVTTLLHRRRYLPDIHSRNRNLRSFAERTAMNTPIQGSAADIIKKAMIDLADRLKREHLQARMLLQVHDELILEAPREEVERLVQVVPEVMENAIQLTVPLKVDYHYGPTWYDAK

SEQ ID NO: 467 - DNA, 1812 bp, synthetic construct
  misc_feature 1..1812: note = Variant of DNA polymerase
  source 1..1812: mol_type = other DNA
atgcatcaccatcaccatcacggtggcagcggtatggttgcaccacagaccaaaaaagaagaggccgtactgctgaacatcaattatacaattgtggaggaagtcaccgaaccgattctcgcggatcgttcggcgttagtggttgaggttctggggtccaactaccataaggctccgatcctgggctttgccctggccaatgagcacggtaacttcttcattcgcactgacacggctctttcttctccgctgtttaccgcgtggctggaggatgagagcaagaagaaatcagtattcgacgctaaacgcgcaatcgtggccctgaaatggaaaggcattgaactgcgtggcatcgaatttgacttgttgctggcttcatatctcctgaatccctcgcagcgtacgccggatgtcgcaagcgtggccaagaccaaacagtacatggcagtacagagtgattgggcagtctatggaaaaggtgcgaaacaaacggtgccagatgaaaacgttttagccgaacatctggtgcgtaaagctgctgcaattcgcgccctggagaaagaactgatccacgatttgcaggaaaatgaacaatacgccctgtttactgaccttgaattacctctgtcctcggtcctggcagagatggaatttaccggtgtgaaagtagatgttgaacgcctgaaagaaatgggcgaggagctcacagaacaactgcgccaagtggagcaggaaatctataagttagctggccaacgcttcaacattaacagccctaaacaactgggtgtcattctgtttgaaaaattacagcttcccgtcctgaagaagacgaagaccggctatagtacgagtgctgatgtgctcgagaaacttgcccgtcagcatgaaatcgtccgcaaaattcttcactaccgtcagctcggtaaactgcaatccacatatattgaagggctgctgaaagttgtacatcgcgacacccataaagtccacaccatcttcaaccaggccctgactcaaaccgggcgcctgtcaagcaccgaacctaatctccagaacatcccaattcgtctggaagaaggccgcaaaattcgccaagcatttgtgccatcgaaacctgactgggttatctttagcgcagattactcacagattgagctccgtgttctcgcacacctggcaaacgatgaaaatctgatcgatgcttttcgtcatgaccttgacatccatacgaagacagccatggatattttccatgtaacagcagatgaagttacccccaatatgcgtcgcctggcaaaagccgtgaacttcggtattgtctatgggatctctgattacggtctgagtcagcgtcttggcatcacgcgcaaagaagccgccgaatttattcgtcgttatttcgaaagctttcccggcgttaaacagtacatggagaatattgtaaaagaagccaaacagaaaggatacgtcaccacccttttacaccgccgccgctatctgccagacatccattctcgtaatcgcaacttacgttcattcgcagaacgcacggccatgaacaccccaattcaaggatcagccgccgacatcatcaagaaggcaatgattgatttagctgatcgtctgaaacgcgagcaccttcaagctcgtatgctgctccaggttcatgacgaactgattcttgaagctcctcgtgaggaagtcgaacgcctggttcagattgtacccgaggtcatggagaacgccatccagttaaccgtcccactgaaagttgattatcactacggtcctacgtggtacgacgctaag

SEQ ID NO: 468 - protein, 604 aa, synthetic construct
  REGION 1..604: note = Variant of DNA polymerase
MHHHHHHGGSGMVAPQTKKEEAVLLNINYTIVEEVTEPILADRSALVVEVLGSNYHKAPILGFALANEHGNFFIRTDTALSSPLFTAWLEDESKKKSVFDAKRAIVALKWKGIELRGIEFDLLLASYLLNPSQRTPDVASVAKTKQYMAVQSDWAVYGKGAKQTVPDENVLAEHLVRKAAAIRALEKELIHDLQENEQYALFTDLELPLSSVLAEMEFTGVKVDVERLKEMGEELTEQLRQVEQEIYKLAGQRFNINSPKQLGVILFEKLQLPVLKKTKTGYSTSADVLEKLARQHEIVRKILHYRQLGKLQSTYIEGLLKVVHRDTHKVHTIFNQALTQTGRLSSTEPNLQNIPIRLEEGRKIRQAFVPSKPDWVIFSADYSQIELRVLAHLANDENLIDAFRHDLDIHTKTAMDIFHVTADEVTPNMRRLAKAVNFGIVYGISDYGLSQRLGITRKEAAEFIRRYFESFPGVKQYMENIVKEAKQKGYVTTLLHRRRYLPDIHSRNRNLRSFAERTAMNTPIQGSAADIIKKAMIDLADRLKREHLQARMLLQVHDELILEAPREEVERLVQIVPEVMENAIQLTVPLKVDYHYGPTWYDAK

SEQ ID NO: 469 - DNA, 1812 bp, synthetic construct
  misc_feature 1..1812: note = Variant of DNA polymerase
  source 1..1812: mol_type = other DNA
atgcatcaccatcaccatcacggtggcagcggtatggttgcaccacagaccaaaaaagaagaggccgtaatgcctaacatcaattatacaattgtggaggaagtcaccgaaccgattctcgcggatcgttcggcgttagtggttgaggttctggggtccaactaccataaggctccgatcctgggctttgccctggccaatgagcacggtaacttcttcattcgcactgacacggctctttcttctccgctgtttaccgcgtggctggaggatgagagcaagaagaaatcagtattcgacgctaaacgcgcaatcgtggccctgaaatggaaaggcattgaattacgtggcatcgaatttgacttgttgctggcttcatatctcctgaatccctcgcagcgtacgccggatgtcgcaagcgtggccaagaccaaacagtacatggcagtacagagtgattgggcagtctatggaaaaggtgcgaaacaaacggtgccagatgaaaacgttttagccgaacatctggtgcgtaaagctgctgcaattcgcgccctggagaaagaactgatccacgatttgcaggaaaatgaacaatacgccctgtttactgaccttgaattacctctgtcctcggtcctggcagagatggaatttaccggtatgaaagtagatgttgaacgcctgaaagaaatgggcgaggagctcacagaacaactgcgccaagtggagcaggaaatctataagttagctggccaacgcttcaacattaacagccctaaacaactgggtgtcattctgtttgaaaaattacagcttcccgtcctgaagaagacgaagaccggctatagtacgagtgctgatgtgctcgagaaacttgcccgtcagcatgaaatcgtccgcaaaattcttcactaccgtcagctcggtaaactgcaatccacatatattgaagggctgctgaaagttgtacatcgcgacacccataaagtccacaccatcttcaaccaggccctgactcaaaccgggcgcctgtcaagcaccgaacctaatctccagaacatcccaattcgtctggaagaaggccgcaaaattcgccaagcatttgtgccatcgaaacctgactgggttatctttagcgcagattactcacagattgagctccgtgttctcgcacacctggcaaacgatgaaaatctgatcgatgcttttcgtcatgaccttgacatccatacgaagacagccatggatattttccatgtaacagcagatgaagttacccccaatatgcgtcgcctggcaaaagccgtgaacttcggtattgtctatgggatctctgattacggtctgagtcagcgtcttggcatcacgcgcaaagaagccgccgaatttattcgtcgttatttcgaaagctttcccggcgttaaacagtacatggagaatattgtaaaagaagccaaacagaaaggatacgtcaccacccttttacaccgccgccgctatctgccagacatccattctcgtaatcgcaacttacgttcattcgcagaacgcacggccatgaacaccccaattcaaggatcagccgccgacatcatcaagaaggcaatgattgatttagctgatcgtctgaaacgcgagcaccttcaagctcgtatgctgctccaggttcatgacgaactgattcttgaagctcctcgtgaggaagtcgaacgcctggttcaggttgtacccgaggtcatggagaacgccatccagttaaccgtcccactgaaagttgattatcactacggtcctacgtggtacgacgctaag

SEQ ID NO: 470 - protein, 604 aa, synthetic construct
  REGION 1..604: note = Variant of DNA polymerase
MHHHHHHGGSGMVAPQTKKEEAVMPNINYTIVEEVTEPILADRSALVVEVLGSNYHKAPILGFALANEHGNFFIRTDTALSSPLFTAWLEDESKKKSVFDAKRAIVALKWKGIELRGIEFDLLLASYLLNPSQRTPDVASVAKTKQYMAVQSDWAVYGKGAKQTVPDENVLAEHLVRKAAAIRALEKELIHDLQENEQYALFTDLELPLSSVLAEMEFTGMKVDVERLKEMGEELTEQLRQVEQEIYKLAGQRFNINSPKQLGVILFEKLQLPVLKKTKTGYSTSADVLEKLARQHEIVRKILHYRQLGKLQSTYIEGLLKVVHRDTHKVHTIFNQALTQTGRLSSTEPNLQNIPIRLEEGRKIRQAFVPSKPDWVIFSADYSQIELRVLAHLANDENLIDAFRHDLDIHTKTAMDIFHVTADEVTPNMRRLAKAVNFGIVYGISDYGLSQRLGITRKEAAEFIRRYFESFPGVKQYMENIVKEAKQKGYVTTLLHRRRYLPDIHSRNRNLRSFAERTAMNTPIQGSAADIIKKAMIDLADRLKREHLQARMLLQVHDELILEAPREEVERLVQVVPEVMENAIQLTVPLKVDYHYGPTWYDAK

SEQ ID NO: 471 - DNA, 1812 bp, synthetic construct
  misc_feature 1..1812: note = Variant of DNA polymerase
  source 1..1812: mol_type = other DNA
atgcatcaccatcaccatcacggtggcagcggtatggttgcaccacagaccaaaaaagaagaggccgtaatgcctaacatcaattatacaattgtggaggaagtcaccgaaccgattctcgcggatcgttcggcgttagtggttgaggttctggggtccaactaccataaggctccgatcctgggctttgccctggccaatgagcacggtaacttcttcattcgcactgacacggctctttcttctccgctgtttaccgcgtggctggaggatgagagcaagaagaaatcagtattcgacgctaaacgcgcaatcgtggccctgaaatggaaaggcattgaataccgtggcatcgaatttgacttgttgctggcttcatatctcctgaatccctcgcagcgtacgccggatgtcgcaagcgtggccaagaccaaacagtacatggcagtacagagtgattgggcagtctatggaaaaggtgcgaaacaaacggtgccagatgaaaacgttttagccgaacatctggtgcgtaaagctgctgcaattcgcgccctggagaaagaactgatccacgatttgcaggaaaatgaacaatacgccctgtttactgaccttgaattacctctgtcctcggtcctggcagagatggaatttaccggtgtgaaagtagatgttgaacgcctgaaagaaatgggcgaggagctcacagaacaactgcgccaagtggagcaggaaatctataagttagctggccaacgcttcaacattaacagccctaaacaactgggtgtcattctgtttgaaaaattacagcttcccgtcctgaagaagacgaagaccggctatagtacgagtgctgatgtgctcgagaaacttgcccgtcagcatgaaatcgtccgcaaaattcttcactaccgtcagctcggtaaactgcaatccacatatattgaagggctgctgaaagttgtacatcgcgacacccataaagtccacaccatcttcaaccaggccctgactcaaaccgggcgcctgtcaagcaccgaacctaatctccagaacatcccaattcgtctggaagaaggccgcaaaattcgccaagcatttgtgccatcgaaacctgactgggttatctttagcgcagattactcacagattgagctccgtgttctcgcacacctggcaaacgatgaaaatctgatcgatgcttttcgtcatgaccttgacatccatacgaagacagccatggatattttccatgtaacagcagatgaagttacccccaatatgcgtcgcctggcaaaagccgtgaacttcggtattgtctatgggatctctgattacggtctgagtcagcgtcttggcatcacgcgcaaagaagccgccgaatttattcgtcgttatttcgaaagctttcccggcgttaaacagtacatggagaatattgtaaaagaagccaaacagaaaggatacgtcaccacccttttacaccgccgccgctatctgccagacatccattctcgtaatcgcaacttacgttcattcgcagaacgcacggccatgaacaccccaattcaaggatcagccgccgacatcatcaagaaggcaatgattgatttagctgatcgtctgaaacgcgagcaccttcaagctcgtatgctgctccaggttcatgacgaactgattcttgaagctcctcgtgaggaagtcgaacgcctggttcagattgtacccgaggtcatggagaacgccatccagttaaccgtcccactgaaagttgattatcactacggtcctacgtggtacgacgctaag

SEQ ID NO: 472 - protein, 604 aa, synthetic construct
  REGION 1..604: note = Variant of DNA polymerase
MHHHHHHGGSGMVAPQTKKEEAVMPNINYTIVEEVTEPILADRSALVVEVLGSNYHKAPILGFALANEHGNFFIRTDTALSSPLFTAWLEDESKKKSVFDAKRAIVALKWKGIEYRGIEFDLLLASYLLNPSQRTPDVASVAKTKQYMAVQSDWAVYGKGAKQTVPDENVLAEHLVRKAAAIRALEKELIHDLQENEQYALFTDLELPLSSVLAEMEFTGVKVDVERLKEMGEELTEQLRQVEQEIYKLAGQRFNINSPKQLGVILFEKLQLPVLKKTKTGYSTSADVLEKLARQHEIVRKILHYRQLGKLQSTYIEGLLKVVHRDTHKVHTIFNQALTQTGRLSSTEPNLQNIPIRLEEGRKIRQAFVPSKPDWVIFSADYSQIELRVLAHLANDENLIDAFRHDLDIHTKTAMDIFHVTADEVTPNMRRLAKAVNFGIVYGISDYGLSQRLGITRKEAAEFIRRYFESFPGVKQYMENIVKEAKQKGYVTTLLHRRRYLPDIHSRNRNLRSFAERTAMNTPIQGSAADIIKKAMIDLADRLKREHLQARMLLQVHDELILEAPREEVERLVQIVPEVMENAIQLTVPLKVDYHYGPTWYDAK

SEQ ID NO: 473 - DNA, 1812 bp, synthetic construct
  misc_feature 1..1812: note = Variant of DNA polymerase
  source 1..1812: mol_type = other DNA
atgcatcaccatcaccatcacggtggcagcggtatggttgcaccacagaccaaaaaagaagaggccgtaatgatgaacatcaattatacaattgtggaggaagtcaccgaaccgattctcgcggatcgttcggcgttagtggttgaggttctggggtccaactaccataaggctccgatcctgggctttgccctggccaatgagcacggtaacttcttcattcgcactgacacggctctttcttctccgctgtttaccgcgtggctggaggatgagagcaagaagaaatcagtattcgacgctaaacgcgcaagcgtggccctgaaatggaaaggcattgaattacgtggcatcgaatttgacttgttgctggcttcatatctcctgaatccctcgcagcgtacgccggatgtcgcaagcgtggccaagaccaaacagtacatggcagtacagagtgattgggcagtctatggaaaaggtgcgaaacaaacggtgccagatgaaaacgttttagccgaacatctggtgcgtaaagctgctgcaattcgcgccctggagaaagaactgatccacgatttgcaggaaaatgaacaatacgccctgtttactgaccttgaattacctctgtcctcggtcctggcagagatggaatttaccggtgtgaaagtagatgttgaacgcctgaaagaaatgggcgaggagctcacagaacaactgcgccaagtggagcaggaaatctataagttagctggccaacgcttcaacattaacagccctaaacaactgggtgtcattctgtttgaaaaattacagcttcccgtcctgaagaagacgaagaccggctatagtacgagtgctgatgtgctcgagaaacttgcccgtcagcatgaaatcgtccgcaaaattcttcactaccgtcagctcggtaaactgcaatccacatatattgaagggctgctgaaagttgtacatcgcgacacccataaagtccacaccatcttcaaccaggccctgactcaaaccgggcgcctgtcaagcaccgaacctaatctccagaacatcccaattcgtctggaagaaggccgcaaaattcgccaagcatttgtgccatcgaaacctgactgggttatctttagcgcagattactcacagattgagctccgtgttctcgcacacctggcaaacgatgaaaatctgatcgatgcttttcgtcatgaccttgacatccatacgaagacagccatggatattttccatgtaacagcagatgaagttacccccaatatgcgtcgcctggcaaaagccgtgaacttcggtattgtctatgggatctctgattacggtctgagtcagcgtcttggcatcacgcgcaaagaagccgccgaatttattcgtcgttatttcgaaagctttcccggcgttaaacagtacatggagaatattgtaaaagaagccaaacagaaaggatacgtcaccacccttttacaccgccgccgctatctgccagacatccattctcgtaatcgcaacttacgttcattcgcagaacgcacggccatgaacaccccaattcaaggatcagccgccgacatcatcaagaaggcaatgattgatttagctgatcgtctgaaacgcgagcaccttcaagctcgtatgctgctccaggttcatgacgaactgattcttgaagctcctcgtgaggaagtcgaacgcctggttcagattgtacccgaggtcatggagaacgccatccagttaaccgtcccactgaaagttgattatcactacggtcctacgtggtacgacgctaag

SEQ ID NO: 474 - protein, 604 aa, synthetic construct
  REGION 1..604: note = Variant of DNA polymerase
MHHHHHHGGSGMVAPQTKKEEAVMMNINYTIVEEVTEPILADRSALVVEVLGSNYHKAPILGFALANEHGNFFIRTDTALSSPLFTAWLEDESKKKSVFDAKRASVALKWKGIELRGIEFDLLLASYLLNPSQRTPDVASVAKTKQYMAVQSDWAVYGKGAKQTVPDENVLAEHLVRKAAAIRALEKELIHDLQENEQYALFTDLELPLSSVLAEMEFTGVKVDVERLKEMGEELTEQLRQVEQEIYKLAGQRFNINSPKQLGVILFEKLQLPVLKKTKTGYSTSADVLEKLARQHEIVRKILHYRQLGKLQSTYIEGLLKVVHRDTHKVHTIFNQALTQTGRLSSTEPNLQNIPIRLEEGRKIRQAFVPSKPDWVIFSADYSQIELRVLAHLANDENLIDAFRHDLDIHTKTAMDIFHVTADEVTPNMRRLAKAVNFGIVYGISDYGLSQRLGITRKEAAEFIRRYFESFPGVKQYMENIVKEAKQKGYVTTLLHRRRYLPDIHSRNRNLRSFAERTAMNTPIQGSAADIIKKAMIDLADRLKREHLQARMLLQVHDELILEAPREEVERLVQIVPEVMENAIQLTVPLKVDYHYGPTWYDAK

SEQ ID NO: 475 - DNA, 1812 bp, synthetic construct
  misc_feature 1..1812: note = Variant of DNA polymerase
  source 1..1812: mol_type = other DNA
atgcatcaccatcaccatcacggtggcagcggtatggttgcaccacagaccaaaaaagaagaggccgtactgatgaacatcaattatacaattgtggaggacgtcaccgaaccgattctcgcggatcgttcggcgttagtggttgaggttctggggtccaactaccataaggctccgatcctgggctttgccctggccaatgagcacggtaacttcttcattcgcactgacacggctctttcttctccgctgtttaccgcgtggctggaggatgagagcaagaagaaatcagtattcgacgctaaacgcgcaatcgtggccctgaaatggaaaggcattgaattacgtggcatcgaatttgacttgttgctggcttcatatctcctgaatccctcgcagcgtacgccggatgtcgcaagcgtggccaagaccaaacagtacatggcagtacagagtgattgggcagtctatggaaaaggtgcgaaacaaacggtgccagatgaaaacgttttagccgaacatctggtgcgtaaagctgctgcaattcgcgccctggagaaagaactgatccacgatttgcaggaaaatgaacaatacgccctgtttactgaccttgaattacctctgtcctcggtcctggcagagatggaatttaccggtgtgaaagtagatgttgaacgcctgaaagaaatgggcgaggagctcacagaacaactgcgccaagtggagcaggaaatctataagttagctggccaacgcttcaacattaacagccctaaacaactgggtgtcattctgtttgaaaaattacagcttcccgtcctgaagaagacgaagaccggctatagtacgagtgctgatgtgctcgagaaacttgcccgtcagcatgaaatcgtccgcaaaattcttcactaccgtcagctcggtaaactgcaatccacatatattgaagggctgctgaaagttgtacatcgcgacacccataaagtccacaccatcttcaaccaggccctgactcaaaccgggcgcctgtcaagcaccgaacctaatctccagaacatcccaattcgtctggaagaaggccgcaaaattcgccaagcatttgtgccatcgaaacctgactgggttatctttagcgcagattactcacagattgagctccgtgttctcgcacacctggcaaacgatgaaaatctgatcgatgcttttcgtcatgaccttgacatccatacgaagacagccatggatattttccatgtaacagcagatgaagttacccccaatatgcgtcgcctggcaaaagccgtgaacttcggtattgtctatgggatctctgattacggtctgagtcagcgtcttggcatcacgcgcaaagaagccgccgaatttattcgtcgttatttcgaaagctttcccggcgttaaacagtacatggagaatattgtaaaagaagccaaacagaaaggatacgtcaccacccttttacaccgccgccgctatctgccagacatccattctcgtaatcgcaacttacgttcattcgcagaacgcacggccatgaacaccccaattcaaggatcagccgccgacatcatcaagaaggcaatgattgatttagctgatcgtctgaaacgcgagcaccttcaagctcgtatgctgctccaggttcatgacgaactgattcttgaagctcctcgtgaggaagtcgaacgcctggttcagattgtacccgaggtcatggagaacgccatccagttaaccgtcccactgaaagttgattatcactacggtcctacgtggtacgacgctaag

SEQ ID NO: 476 - protein, 604 aa, synthetic construct
  REGION 1..604: note = Variant of DNA polymerase
MHHHHHHGGSGMVAPQTKKEEAVLMNINYTIVEDVTEPILADRSALVVEVLGSNYHKAPILGFALANEHGNFFIRTDTALSSPLFTAWLEDESKKKSVFDAKRAIVALKWKGIELRGIEFDLLLASYLLNPSQRTPDVASVAKTKQYMAVQSDWAVYGKGAKQTVPDENVLAEHLVRKAAAIRALEKELIHDLQENEQYALFTDLELPLSSVLAEMEFTGVKVDVERLKEMGEELTEQLRQVEQEIYKLAGQRFNINSPKQLGVILFEKLQLPVLKKTKTGYSTSADVLEKLARQHEIVRKILHYRQLGKLQSTYIEGLLKVVHRDTHKVHTIFNQALTQTGRLSSTEPNLQNIPIRLEEGRKIRQAFVPSKPDWVIFSADYSQIELRVLAHLANDENLIDAFRHDLDIHTKTAMDIFHVTADEVTPNMRRLAKAVNFGIVYGISDYGLSQRLGITRKEAAEFIRRYFESFPGVKQYMENIVKEAKQKGYVTTLLHRRRYLPDIHSRNRNLRSFAERTAMNTPIQGSAADIIKKAMIDLADRLKREHLQARMLLQVHDELILEAPREEVERLVQIVPEVMENAIQLTVPLKVDYHYGPTWYDAK

SEQ ID NO: 477 - DNA, 1812 bp, synthetic construct
  misc_feature 1..1812: note = Variant of DNA polymerase
  source 1..1812: mol_type = other DNA
atgcatcaccatcaccatcacggtggcagcggtatggttgcaccacagaccaaaaaagaagaggccgtaatgctgaacatcaattatacaattgtggaggaagtcaccgaaccgattctcgcggatcgttcggcgttagtggttgaggttctggggtccaactaccataaggctccgatcctgggctttgccctggccaatgagcacggtaacttcttcattcgcactgacacggctctttcttctccgctgtttaccgcgtggctggaggatgagagcaagaagaaatcagtattcgacgctaaacgcgcaagcgtggccctgaaatggaaaggcattgaactgcgtggcatcgaatttgacttgttgctggcttcatatctcctgaatccctcgcagcgtacgccggatgtcgcaagcgtggccaagaccaaacagtacatggcagtacagagtgattgggcagtctatggaaaaggtgcgaaacaaacggtgccagatgaaaacgttttagccgaacatctggtgcgtaaagctgctgcaattcgcgccctggagaaagaactgatccacgatttgcaggaaaatgaacaatacgccctgtttactgaccttgaattacctctgtcctcggtcctggcagagatggaatttaccggtgtgaaagtagatgttgaacgcctgaaagaaatgggcgaggagctcacagaacaactgcgccaagtggagcaggaaatctataagttagctggccaacgcttcaacattaacagccctaaacaactgggtgtcattctgtttgaaaaattacagcttcccgtcctgaagaagacgaagaccggctatagtacgagtgctgatgtgctcgagaaacttgcccgtcagcatgaaatcgtccgcaaaattcttcactaccgtcagctcggtaaactgcaatccacatatattgaagggctgctgaaagttgtacatcgcgacacccataaagtccacaccatcttcaaccaggccctgactcaaaccgggcgcctgtcaagcaccgaacctaatctccagaacatcccaattcgtctggaagaaggccgcaaaattcgccaagcatttgtgccatcgaaacctgactgggttatctttagcgcagattactcacagattgagctccgtgttctcgcacacctggcaaacgatgaaaatctgatcgatgcttttcgtcatgaccttgacatccatacgaagacagccatggatattttccatgtaacagcagatgaagttacccccaatatgcgtcgcctggcaaaagccgtgaacttcggtattgtctatgggatctctgattacggtctgagtcagcgtcttggcatcacgcgcaaagaagccgccgaatttattcgtcgttatttcgaaagctttcccggcgttaaacagtacatggagaatattgtaaaagaagccaaacagaaaggatacgtcaccacccttttacaccgccgccgctatctgccagacatccattctcgtaatcgcaacttacgttcattcgcagaacgcacggccatgaacaccccaattcaaggatcagccgccgacatcatcaagaaggcaatgattgatttagctgatcgtctgaaacgcgagcaccttcaagctcgtatgctgctccaggttcatgacgaactgattcttgaagctcctcgtgaggaagtcgaacgcctggttcagattgtacccgaggtcatggagaacgccatccagttaaccgtcccactgaaagttgattatcactacggtcctacgtggtacgacgctaag

SEQ ID NO: 478 - protein, 604 aa, synthetic construct
  REGION 1..604: note = Variant of DNA polymerase
MHHHHHHGGSGMVAPQTKKEEAVMLNINYTIVEEVTEPILADRSALVVEVLGSNYHKAPILGFALANEHGNFFIRTDTALSSPLFTAWLEDESKKKSVFDAKRASVALKWKGIELRGIEFDLLLASYLLNPSQRTPDVASVAKTKQYMAVQSDWAVYGKGAKQTVPDENVLAEHLVRKAAAIRALEKELIHDLQENEQYALFTDLELPLSSVLAEMEFTGVKVDVERLKEMGEELTEQLRQVEQEIYKLAGQRFNINSPKQLGVILFEKLQLPVLKKTKTGYSTSADVLEKLARQHEIVRKILHYRQLGKLQSTYIEGLLKVVHRDTHKVHTIFNQALTQTGRLSSTEPNLQNIPIRLEEGRKIRQAFVPSKPDWVIFSADYSQIELRVLAHLANDENLIDAFRHDLDIHTKTAMDIFHVTADEVTPNMRRLAKAVNFGIVYGISDYGLSQRLGITRKEAAEFIRRYFESFPGVKQYMENIVKEAKQKGYVTTLLHRRRYLPDIHSRNRNLRSFAERTAMNTPIQGSAADIIKKAMIDLADRLKREHLQARMLLQVHDELILEAPREEVERLVQIVPEVMENAIQLTVPLKVDYHYGPTWYDAK

SEQ ID NO: 479 - DNA, 1812 bp, synthetic construct
  misc_feature 1..1812: note = Variant of DNA polymerase
  source 1..1812: mol_type = other DNA
atgcatcaccatcaccatcacggtggcagcggtatggttgcaccacagaccaaaaaagaagaggccgtactgatgaacatcaattatacaattgtggaggaagtcaccgaaccgattctcgcggatcgttcggcgttagtggttgaggttctggggtccaactaccataaggctccgatcctgggctttgccctggccaatgagcacggtaacttcttcattcgcactgacacggctctttcttctccgctgtttaccgcgtggctggaggatgagagcaagaagaaatcagtattcgacgctaaacgcgcaatcgtggccctgaaatggaaaggcattgaattacgtggcatcgaatttgacttgttgctggcttcatatctcctgaatccctcgcagcgtacgccggatgtcgcaagcgtggccaagaccaaacagtacatggcagtacagagtgattgggcagtctatggaaaaggtgcgaaacaaacggtgccagatgaaaacgttttagccgaacatctggtgcgtaaagctgctgcaattcgcgccctggagaaagaactgatccacgatttgcaggaaaatgaacaatacgccctgtttactgaccttgaattacctctgtcctcggtcctggcagagatggaatttaccggtgtgaaagtagatgttgaacgcctgaaagaaatgggcgaggagctcacagaacaactgcgccaagtggagcaggaaatctataagttagctggccaacgcttcaacattaacagccctaaacaactgggtgtcattctgtttgaaaaattacagcttcccgtcctgaagaagacgaagaccggctatagtacgagtgctgatgtgctcgagaaacttgcccgtcagcatgaaatcgtccgcaaaattcttcactaccgtcagctcggtaaactgcaatccacatatattgaagggctgctgaaagttgtacatcgcgacacccataaagtccacaccatcttcaaccaggccctgactcaaaccgggcgcctgtcaagcaccgaacctaatctccagaacatcccaattcgtctggaagaaggccgcaaaattcgccaagcatttgtgccatcgaaacctgactgggttatctttagcgcagattactcacagattgagctccgtgttctcgcacacctggcaaacgatgaaaatctgatcgatgcttttcgtcatgaccttgacatccatacgaagacagccatggatattttccatgtaacagcagatgaagttacccccaatatgcgtcgcctggcaaaagccgtgaacttcggtattgtctatgggatctctgattacggtctgagtcagcgtcttggcatcacgcgcaaagaagccgccgaatttattcgtcgttatttcgaaagctttcccggcgttaaacagtacatggagaatattgtaaaagaagccaaacagaaaggatacgtcaccacccttttacaccgccgccgctatctgccagacatccattctcgtaatcgcaacttacgttcattcgcagaacgcacggccatgaacaccccaattcaaggatcagccgccgacatcatcaagaaggcaatgattgatttagctgatcgtctgaaacgcgagcaccttcaagctcgtatgctgctccaggttcatgacgaactgattcttgaagctcctcgtgaggaagtcgaacgcctggttcagattgtacccgaggtcatggagaacgccatccagttaaccgtcccactgaaagttgattatcactacggtcctacgtggtacgacgctaag

SEQ ID NO: 480 - protein, 604 aa, synthetic construct
  REGION 1..604: note = Variant of DNA polymerase
MHHHHHHGGSGMVAPQTKKEEAVLMNINYTIVEEVTEPILADRSALVVEVLGSNYHKAPILGFALANEHGNFFIRTDTALSSPLFTAWLEDESKKKSVFDAKRAIVALKWKGIELRGIEFDLLLASYLLNPSQRTPDVASVAKTKQYMAVQSDWAVYGKGAKQTVPDENVLAEHLVRKAAAIRALEKELIHDLQENEQYALFTDLELPLSSVLAEMEFTGVKVDVERLKEMGEELTEQLRQVEQEIYKLAGQRFNINSPKQLGVILFEKLQLPVLKKTKTGYSTSADVLEKLARQHEIVRKILHYRQLGKLQSTYIEGLLKVVHRDTHKVHTIFNQALTQTGRLSSTEPNLQNIPIRLEEGRKIRQAFVPSKPDWVIFSADYSQIELRVLAHLANDENLIDAFRHDLDIHTKTAMDIFHVTADEVTPNMRRLAKAVNFGIVYGISDYGLSQRLGITRKEAAEFIRRYFESFPGVKQYMENIVKEAKQKGYVTTLLHRRRYLPDIHSRNRNLRSFAERTAMNTPIQGSAADIIKKAMIDLADRLKREHLQARMLLQVHDELILEAPREEVERLVQIVPEVMENAIQLTVPLKVDYHYGPTWYDAK

SEQ ID NO: 481 - DNA, 1812 bp, synthetic construct
  misc_feature 1..1812: note = Variant of DNA polymerase
  source 1..1812: mol_type = other DNA
atgcatcaccatcaccatcacggtggcagcggtatggttgcaccacagaccaaaaaagaagaggccgtactgatgaacatcaattatacaattgtggaggaagtcaccgaaccgattctcgcggatcgttcggcgttagtggttgaggttctggggtccaactaccataaggctccgatcctgggctttgccctggccaatgagcacggtaacttcttcattcgcactgacacggctctttcttctccgctgtttaccgcgtggctggaggatgagagcaagaagaaatcagtattcgacgctaaacgcgcaagcgtggccctgaaatggaaaggcattgaattacgtggcatcgaatttgacttgttgctggcttcatatctcctgaatccctcgcagcgtacgccggatgtcgcaagcgtggccaagaccaaacagtacatggcagtacagagtgattgggcagtctatggaaaaggtgcgaaacaaacggtgccagatgaaaacgttttagccgaacatctggtgcgtaaagctgctgcaattcgcgccctggagaaagaactgatccacgatttgcaggaaaatgaacaatacgccctgtttactgaccttgaattacctctgtcctcggtcctggcagagatggaatttaccggtatgaaagtagatgttgaacgcctgaaagaaatgggcgaggagctcacagaacaactgcgccaagtggagcaggaaatctataagttagctggccaacgcttcaacattaacagccctaaacaactgggtgtcattctgtttgaaaaattacagcttcccgtcctgaagaagacgaagaccggctatagtacgagtgctgatgtgctcgagaaacttgcccgtcagcatgaaatcgtccgcaaaattcttcactaccgtcagctcggtaaactgcaatccacatatattgaagggctgctgaaagttgtacatcgcgacacccataaagtccacaccatcttcaaccaggccctgactcaaaccgggcgcctgtcaagcaccgaacctaatctccagaacatcccaattcgtctggaagaaggccgcaaaattcgccaagcatttgtgccatcgaaacctgactgggttatctttagcgcagattactcacagattgagctccgtgttctcgcacacctggcaaacgatgaaaatctgatcgatgcttttcgtcatgaccttgacatccatacgaagacagccatggatattttccatgtaacagcagatgaagttacccccaatatgcgtcgcctggcaaaagccgtgaacttcggtattgtctatgggatctctgattacggtctgagtcagcgtcttggcatcacgcgcaaagaagccgccgaatttattcgtcgttatttcgaaagctttcccggcgttaaacagtacatggagaatattgtaaaagaagccaaacagaaaggatacgtcaccacccttttacaccgccgccgctatctgccagacatccattctcgtaatcgcaacttacgttcattcgcagaacgcacggccatgaacaccccaattcaaggatcagccgccgacatcatcaagaaggcaatgattgatttagctgatcgtctgaaacgcgagcaccttcaagctcgtatgctgctccaggttcatgacgaactgattcttgaagctcctcgtgaggaagtcgaacgcctggttcagattgtacccgaggtcatggagaacgccatccagttaaccgtcccactgaaagttgattatcactacggtcctacgtggtacgacgctaag

SEQ ID NO: 482 - protein, 604 aa, synthetic construct
  REGION 1..604: note = Variant of DNA polymerase
MHHHHHHGGSGMVAPQTKKEEAVLMNINYTIVEEVTEPILADRSALVVEVLGSNYHKAPILGFALANEHGNFFIRTDTALSSPLFTAWLEDESKKKSVFDAKRASVALKWKGIELRGIEFDLLLASYLLNPSQRTPDVASVAKTKQYMAVQSDWAVYGKGAKQTVPDENVLAEHLVRKAAAIRALEKELIHDLQENEQYALFTDLELPLSSVLAEMEFTGMKVDVERLKEMGEELTEQLRQVEQEIYKLAGQRFNINSPKQLGVILFEKLQLPVLKKTKTGYSTSADVLEKLARQHEIVRKILHYRQLGKLQSTYIEGLLKVVHRDTHKVHTIFNQALTQTGRLSSTEPNLQNIPIRLEEGRKIRQAFVPSKPDWVIFSADYSQIELRVLAHLANDENLIDAFRHDLDIHTKTAMDIFHVTADEVTPNMRRLAKAVNFGIVYGISDYGLSQRLGITRKEAAEFIRRYFESFPGVKQYMENIVKEAKQKGYVTTLLHRRRYLPDIHSRNRNLRSFAERTAMNTPIQGSAADIIKKAMIDLADRLKREHLQARMLLQVHDELILEAPREEVERLVQIVPEVMENAIQLTVPLKVDYHYGPTWYDAK

SEQ ID NO: 483 - DNA, 1812 bp, synthetic construct
  misc_feature 1..1812: note = Variant of DNA polymerase
  source 1..1812: mol_type = other DNA
atgcatcaccatcaccatcacggtggcagcggtatggttgcaccacagaccaaaaaagaagaggccgtaatgctgaacatcaattatacaattgtggaggaagtcaccgaaccgattctcgcggatcgttcggcgttagtggttgaggttctggggtccaactaccataaggctccgatcctgggctttgccctggccaatgagcacggtaacttcttcattcgcactgacacggctctttcttctccgctgtttaccgcgtggctggaggatgagagcaagaagaaatcagtattcgacgctaaacgcgcaatcgtggccctgaaatggaaaggcattgaattacgtggcatcgaatttgacttgttgctggcttcatatctcctgaatccctcgcagcgtacgccggatgtcgcaagcgtggccaagaccaaacagtacatggcagtacagagtgattgggcagtctatggaaaaggtgcgaaacaaacggtgccagatgaaaacgttttagccgaacatctggtgcgtaaagctgctgcaattcgcgccctggagaaagaactgatccacgatttgcaggaaaatgaacaatacgccctgtttactgaccttgaattacctctgtcctcggtcctggcagagatggaatttaccggtgtgaaagtagatgttgaacgcctgaaagaaatgggcgaggagctcacagaacaactgcgccaagtggagcaggaaatctataagttagctggccaacgcttcaacattaacagccctaaacaactgggtgtcattctgtttgaaaaattacagcttcccgtcctgaagaagacgaagaccggctatagtacgagtgctgatgtgctcgagaaacttgcccgtcagcatgaaatcgtccgcaaaattcttcactaccgtcagctcggtaaactgcaatccacatatattgaagggctgctgaaagttgtacatcgcgacacccataaagtccacaccatcttcaaccaggccctgactcaaaccgggcgcctgtcaagcaccgaacctaatctccagaacatcccaattcgtctggaagaaggccgcaaaattcgccaagcatttgtgccatcgaaacctgactgggttatctttagcgcagattactcacagattgagctccgtgttctcgcacacctggcaaacgatgaaaatctgatcgatgcttttcgtcatgaccttgacatccatacgaagacagccatggatattttccatgtaacagcagatgaagttacccccaatatgcgtcgcctggcaaaagccgtgaacttcggtattgtctatgggatctctgattacggtctgagtcagcgtcttggcatcacgcgcaaagaagccgccgaatttattcgtcgttatttcgaaagctttcccggcgttaaacagtacatggagaatattgtaaaagaagccaaacagaaaggatacgtcaccacccttttacaccgccgccgctatctgccagacatccattctcgtaatcgcaacttacgttcattcgcagaacgcacggccatgaacaccccaattcaaggatcagccgccgacatcatcaagaaggcaatgattgatttagctgatcgtctgaaacgcgagcaccttcaagctcgtatgctgctccaggttcatgacgaactgattcttgaagctcctcgtgaggaagtcgaacgcctggttcagattgtacccgaggtcatggagaacgccatccagttaaccgtcccactgaaagttgattatcactacggtcctacgtggtacgacgctaag

SEQ ID NO: 484 - protein, 604 aa, synthetic construct
  REGION 1..604: note = Variant of DNA polymerase
MHHHHHHGGSGMVAPQTKKEEAVMLNINYTIVEEVTEPILADRSALVVEVLGSNYHKAPILGFALANEHGNFFIRTDTALSSPLFTAWLEDESKKKSVFDAKRAIVALKWKGIELRGIEFDLLLASYLLNPSQRTPDVASVAKTKQYMAVQSDWAVYGKGAKQTVPDENVLAEHLVRKAAAIRALEKELIHDLQENEQYALFTDLELPLSSVLAEMEFTGVKVDVERLKEMGEELTEQLRQVEQEIYKLAGQRFNINSPKQLGVILFEKLQLPVLKKTKTGYSTSADVLEKLARQHEIVRKILHYRQLGKLQSTYIEGLLKVVHRDTHKVHTIFNQALTQTGRLSSTEPNLQNIPIRLEEGRKIRQAFVPSKPDWVIFSADYSQIELRVLAHLANDENLIDAFRHDLDIHTKTAMDIFHVTADEVTPNMRRLAKAVNFGIVYGISDYGLSQRLGITRKEAAEFIRRYFESFPGVKQYMENIVKEAKQKGYVTTLLHRRRYLPDIHSRNRNLRSFAERTAMNTPIQGSAADIIKKAMIDLADRLKREHLQARMLLQVHDELILEAPREEVERLVQIVPEVMENAIQLTVPLKVDYHYGPTWYDAK

SEQ ID NO: 485 - DNA, 1812 bp, synthetic construct
  misc_feature 1..1812: note = Variant of DNA polymerase
  source 1..1812: mol_type = other DNA
atgcatcaccatcaccatcacggtggcagcggtatggttgcaccacagaccaaaaaagaagaggccgtaatgcctaacatcaattatacaattgtggaggaagtcaccgaaccgattctcgcggatcgttcggcgttagtggttgaggttctggggtccaactaccataagaagccgatcctgggctttgccctggccaatgagcacggtaacttcttcattcgcactgacacggctctttcttctccgctgtttaccgcgtggctggaggatgagagcaagaagaaatcagtattcgacgctaaacgcgcaatcgtggccctgaaatggaaaggcattgaattacgtggcatcgaatttgacttgttgctggcttcatatctcctgaatccctcgcagcgtacgccggatgtcgcaagcgtggccaagaccaaacagtacatggcagtacagagtgattgggcagtctatggaaaaggtgcgaaacaaacggtgccagatgaaaacgttttagccgaacatctggtgcgtaaagctgctgcaattcgcgccctggagaaagaactgatccacgatttgcaggaaaatgaacaatacgccctgtttactgaccttgaattacctctgtcctcggtcctggcagagatggaatttaccggtgtgaaagtagatgttgaacgcctgaaagaaatgggcgaggagctcacagaacaactgcgccaagtggagcaggaaatctataagttagctggccaacgcttcaacattaacagccctaaacaactgggtgtcattctgtttgaaaaattacagcttcccgtcctgaagaagacgaagaccggctatagtacgagtgctgatgtgctcgagaaacttgcccgtcagcatgaaatcgtccgcaaaattcttcactaccgtcagctcggtaaactgcaatccacatatattgaagggctgctgaaagttgtacatcgcgacacccataaagtccacaccatcttcaaccaggccctgactcaaaccgggcgcctgtcaagcaccgaacctaatctccagaacatcccaattcgtctggaagaaggccgcaaaattcgccaagcatttgtgccatcgaaacctgactgggttatctttagcgcagattactcacagattgagctccgtgttctcgcacacctggcaaacgatgaaaatctgatcgatgcttttcgtcatgaccttgacatccatacgaagacagccatggatattttccatgtaacagcagatgaagttacccccaatatgcgtcgccaggcaaaagccgtgaacttcggtattgtctatgggatctctgattacggtctgagtcagcgtcttggcatcacgcgcaaagaagccgccgaatttattcgtcgttatttcgaaagctttcccggcgttaaacagtacatggagaatattgtaaaagaagccaaacagaaaggatacgtcaccacccttttacaccgccgccgctatctgccagacatccattctcgtaatcgcaacttacgttcattcgcagaacgcacggccatgaacaccccaattcaaggatcagccgccgacatcatcaagaaggcaatgattgatttagctgatcgtctgaaacgcgagcaccttcaagctcgtatgctgctccaggttcatgacgaactgattcttgaagctcctcgtgaggaagtcgaacgcctggttcaggttgtacccgaggtcatggagaacgccatccagttaaccgtcccactgaaagttgattatcactacggtcctacgtggtacgacgctaag

SEQ ID NO: 486 - protein, 604 aa, synthetic construct
  REGION 1..604: note = Variant of DNA polymerase
MHHHHHHGGSGMVAPQTKKEEAVMPNINYTIVEEVTEPILADRSALVVEVLGSNYHKKPILGFALANEHGNFFIRTDTALSSPLFTAWLEDESKKKSVFDAKRAIVALKWKGIELRGIEFDLLLASYLLNPSQRTPDVASVAKTKQYMAVQSDWAVYGKGAKQTVPDENVLAEHLVRKAAAIRALEKELIHDLQENEQYALFTDLELPLSSVLAEMEFTGVKVDVERLKEMGEELTEQLRQVEQEIYKLAGQRFNINSPKQLGVILFEKLQLPVLKKTKTGYSTSADVLEKLARQHEIVRKILHYRQLGKLQSTYIEGLLKVVHRDTHKVHTIFNQALTQTGRLSSTEPNLQNIPIRLEEGRKIRQAFVPSKPDWVIFSADYSQIELRVLAHLANDENLIDAFRHDLDIHTKTAMDIFHVTADEVTPNMRRQAKAVNFGIVYGISDYGLSQRLGITRKEAAEFIRRYFESFPGVKQYMENIVKEAKQKGYVTTLLHRRRYLPDIHSRNRNLRSFAERTAMNTPIQGSAADIIKKAMIDLADRLKREHLQARMLLQVHDELILEAPREEVERLVQVVPEVMENAIQLTVPLKVDYHYGPTWYDAK

SEQ ID NO: 487 - DNA, 1812 bp, synthetic construct
  misc_feature 1..1812: note = Variant of DNA polymerase
  source 1..1812: mol_type = other DNA
atgcatcaccatcaccatcacggtggcagcggtatggttgcaccacagaccaaaaaagaagaggccgtaatgatgaacatcaattatacaattgtggaggaagtcaccgaaccgattctcgcggatcgttcggcgttagtggttgaggttctggggtccaactaccataaggctccgatcctgggctttgccctggccaatgagcacggtaacttcttcattcgcactgacacggctctttcttctccgctgtttaccgcgtggctggaggatgagagcaagaagaaatcagtattcgacgctaaacgcgcaagcgtggccctgaaatggaaaggcattgaactgcgtggcatcgaatttgacttgttgctggcttcatatctcctgaatccctcgcagcgtacgccggatgtcgcaagcgtggccaagaccaaacagtacatggcagtacagagtgattgggcagtctatggaaaaggtgcgaaacaaacggtgccagatgaaaacgttttagccgaacatctggtgcgtaaagctgctgcaattcgcgccctggagaaagaactgatccacgatttgcaggaaaatgaacaatacgccctgtttactgaccttgaattacctctgtcctcggtcctggcagagatggaatttaccggtgtgaaagtagatgttgaacgcctgaaagaaatgggcgaggagctcacagaacaactgcgccaagtggagcaggaaatctataagttagctggccaacgcttcaacattaacagccctaaacaactgggtgtcattctgtttgaaaaattacagcttcccgtcctgaagaagacgaagaccggctatagtacgagtgctgatgtgctcgagaaacttgcccgtcagcatgaaatcgtccgcaaaattcttcactaccgtcagctcggtaaactgcaatccacatatattgaagggctgctgaaagttgtacatcgcgacacccataaagtccacaccatcttcaaccaggccctgactcaaaccgggcgcctgtcaagcaccgaacctaatctccagaacatcccaattcgtctggaagaaggccgcaaaattcgccaagcatttgtgccatcgaaacctgactgggttatctttagcgcagattactcacagattgagctccgtgttctcgcacacctggcaaacgatgaaaatctgatcgatgcttttcgtcatgaccttgacatccatacgaagacagccatggatattttccatgtaacagcagatgaagttacccccaatatgcgtcgcctggcaaaagccgtgaacttcggtattgtctatgggatctctgattacggtctgagtcagcgtcttggcatcacgcgcaaagaagccgccgaatttattcgtcgttatttcgaaagctttcccggcgttaaacagtacatggagaatattgtaaaagaagccaaacagaaaggatacgtcaccacccttttacaccgccgccgctatctgccagacatccattctcgtaatcgcaacttacgttcattcgcagaacgcacggccatgaacaccccaattcaaggatcagccgccgacatcatcaagaaggcaatgattgatttagctgatcgtctgaaacgcgagcaccttcaagctcgtatgctgctccaggttcatgacgaactgattcttgaagctcctcgtgaggaagtcgaacgcctggttcaggttgtacccgaggtcatggagaacgccatccagttaaccgtcccactgaaagttgattatcactacggtcctacgtggtacgacgctaag

SEQ ID NO: 488 - protein, 604 aa, synthetic construct
  REGION 1..604: note = Variant of DNA polymerase
MHHHHHHGGSGMVAPQTKKEEAVMMNINYTIVEEVTEPILADRSALVVEVLGSNYHKAPILGFALANEHGNFFIRTDTALSSPLFTAWLEDESKKKSVFDAKRASVALKWKGIELRGIEFDLLLASYLLNPSQRTPDVASVAKTKQYMAVQSDWAVYGKGAKQTVPDENVLAEHLVRKAAAIRALEKELIHDLQENEQYALFTDLELPLSSVLAEMEFTGVKVDVERLKEMGEELTEQLRQVEQEIYKLAGQRFNINSPKQLGVILFEKLQLPVLKKTKTGYSTSADVLEKLARQHEIVRKILHYRQLGKLQSTYIEGLLKVVHRDTHKVHTIFNQALTQTGRLSSTEPNLQNIPIRLEEGRKIRQAFVPSKPDWVIFSADYSQIELRVLAHLANDENLIDAFRHDLDIHTKTAMDIFHVTADEVTPNMRRLAKAVNFGIVYGISDYGLSQRLGITRKEAAEFIRRYFESFPGVKQYMENIVKEAKQKGYVTTLLHRRRYLPDIHSRNRNLRSFAERTAMNTPIQGSAADIIKKAMIDLADRLKREHLQARMLLQVHDELILEAPREEVERLVQVVPEVMENAIQLTVPLKVDYHYGPTWYDAK

SEQ ID NO: 489 - DNA, 1809 bp, synthetic construct
  misc_feature 1..1809: note = Variant of DNA polymerase
  source 1..1809: mol_type = other DNA
atgcatcaccatcaccatcacggtggcagcggtatggccgtgcagacagatgaaggtgagaaaccgttagcaggcatggactttgcgatcgcagactctgtaaccgatgaaatgctggcggataaagctgcactggtggtggaagtagtcggcgataactatcatcatgctccaattgtaggaattgccctggccaatgaacgcggtcgtttctttttgcgcccggaaacggcgcttgcagaccctaagttcctggcgtggctgggcgacgagaccaagaagaagacgatgttcgactcaaaacgtgcggctgttgccctgaaatggaaaggtatcgaattacgtggcgtggtctttgatttattgctcgctgcctaccttttggatccggcacaagcggcgggagatgttgcagcggtcgccaaaatgcaccagtatgaagccgtacgtagcgatgaggcagtctacggtaaaggcgccaaacgcactgtgcccgacgaaccaaccctcgctgaacacctcgtgcgcaaagccgctgcaatttgggcacttgaagagccgttgatggatgaattacgtcgcaacgaacaggaccgcctgcttaccgaactcgaacaaccgttggccgggatcctcgcgaatatggaatttacgggagtgaaagtcgacactaaacgcttagagcaaatgggtgccgagctcaccgaacagttgcaggctgttgaacgtcgtatttatgagttagcaggccaggaattcaacatcaacagccctaaacaattaggcaccgtactctttgataaactccagcttccggtgctcaagaaaacgaagacaggctactctacgagtgccgatgtgcttgagaaacttgccccgcaccatgaaattgtcgaacatatccttcactatcgtcaattgggcaagctccaatccacctatattgaagggctgttgaaagtcgtacatccagtgactggtaaagtgcataccatgtttaatcaggccttaacacagactggccgtttaagtagcgtggaacccaaccttcaaaatatccctattcgtttggaagaagggcgcaaaattcgccaggcattcgtaccatcagaaccagactggttaatttttgctgcagattactcgcagatcgaactccgtgtcttagctcatattgcagaagatgacaacttgatcgaagcattccgccgtggccttgacatccacacgaagacagccatggatattttccatgtgagcgaggaggatgtcaccgcaaatatgcgtcgccaggcaaaagccgtgaactttggtattgtctatgggatctcggattatggattggctcagaacctcaatatcacccgtaaagaggccgccgagttcattgaacgttactttgcttcgtttcctggcgtgaaacagtacatggataacattgtacaagaagccaaacagaaagggtacgtcaccaccctcttacaccgccgccgctatctccccgatattacctcccgcaatttcaacgtccgtagtttcgccgaacgcacggcaatgaacaccccaatccaaggttcagccgcagacatcatcaagaaagcaatgatcgatttaagcgtccgtttgcgtgaagaacgtctccaagcacgcctcttgttacaggtacatgacgaacttattcttgaagcacccaaagaagaaatcgaacgtttatgccgccttgtgcccgaggtaatggaacaagctgttacgcttcgtgtcccattgaaagtagattatcactacggccctacgtggtacgacgctaag

SEQ ID NO: 490 - protein, 603 aa, synthetic construct
  REGION 1..603: note = Variant of DNA polymerase
MHHHHHHGGSGMAVQTDEGEKPLAGMDFAIADSVTDEMLADKAALVVEVVGDNYHHAPIVGIALANERGRFFLRPETALADPKFLAWLGDETKKKTMFDSKRAAVALKWKGIELRGVVFDLLLAAYLLDPAQAAGDVAAVAKMHQYEAVRSDEAVYGKGAKRTVPDEPTLAEHLVRKAAAIWALEEPLMDELRRNEQDRLLTELEQPLAGILANMEFTGVKVDTKRLEQMGAELTEQLQAVERRIYELAGQEFNINSPKQLGTVLFDKLQLPVLKKTKTGYSTSADVLEKLAPHHEIVEHILHYRQLGKLQSTYIEGLLKVVHPVTGKVHTMFNQALTQTGRLSSVEPNLQNIPIRLEEGRKIRQAFVPSEPDWLIFAADYSQIELRVLAHIAEDDNLIEAFRRGLDIHTKTAMDIFHVSEEDVTANMRRQAKAVNFGIVYGISDYGLAQNLNITRKEAAEFIERYFASFPGVKQYMDNIVQEAKQKGYVTTLLHRRRYLPDITSRNFNVRSFAERTAMNTPIQGSAADIIKKAMIDLSVRLREERLQARLLLQVHDELILEAPKEEIERLCRLVPEVMEQAVTLRVPLKVDYHYGPTWYDAK

SEQ ID NO: 491 - DNA, 1815 bp, synthetic construct
  misc_feature 1..1815: note = Variant of DNA polymerase
  source 1..1815: mol_type = other DNA
atgcatcaccatcaccatcacggtggcagcggtatgctggaacagaacgaagatcctgacgtgcaaaccgagctcgcgaatattgactatgaaacggtagaagaagtcgatgaaacaatgctggcagatgaagcggcgctgatcgttgaggtgttagaagccaactaccataaagccccgattttgggctttgctcttgccagcgagaaaaagaccctcttcatcccgacggatgtggctttatcgtctcccatttttaaagcatggctggaagacgagaagaagaaaaaatccgtattcgacgcaaaacgcgcacttgtggcccttaaatggcaagggatcgaaatgcgtggtattgattttgatctgttaatcgcctcatatctcttgaatccgtcccacagtaccgatgacgttgcaagcgtcgccaagaccaaacagtacactgaagtacagccagatgaggcggtctatggtaaaggcgctaaacaggcgatcccggacaaaaaatcactcgccgatcatttggtgcgcaaagcggttgcaattcgcgccctgaagcgtgaattcgttgcggatttgaaagccaacgaacaatatttattgctcacggaattagagcttcctcttaccttaattctcgcggagatggaatttacaggagtgaaagttgatgttcaacgtctccgtaatatgggcgaggaactcaacgagcagttgaaaatgattgaacaggacatctaccagagcgcgggccaggaattcaatatcaacagcccaaaacagttaggtgtcgtgttgtttgaaaaactccagttgcccgtgatcaagaagacgaagaccggctactctacatcggcggatgtgctcgagaaacttgctccataccacgaaatcgtcgaaaaaattcttcattatcgtcagttagggaaattatattcgacttatgtcgaaggcctgttaaaagttgtacaccaagacacgaacaaagtacataccatttttaatcaagcattgactcaaactggtcgcttaagtagtaccgaacctaacctccagaacattcccatccgtttagaagaagggcgcaagattcgtcaggcattcattccatcggaaccagactgggtgatctttgctgccgattactcacaaatcgaacttcgcgttctcgcgcacattgctaatgatcaaaatttaattgaagcctttcgtaacgacctcgacatccatacgaagacggccatggatattttccatgtgagcgaagagaaagtcaccagtcaaatgcgtcgccaggcaaaagctgtgaactttggtattgtctacggaatctccgattacggtttgagccagaacctcaatattagccgcaaagaagccgcacagttcatcgaacgttattttgcatcttttcccggcgttaaacagtatatggaggatattgtacgctacgctaaacagacagggtatgtcaccacccttcttcaccgtcgtcgctatctcccagatattacctcccgcaacttcaatttacgttcatttgccgaacgcacggccatgaacacccctatccaagggagcgcagctgatatcatcaagaaggcaatgattgatcttgctgaacgtttgaaacaggaagagctccaagctcgcattttgctccaggtacatgacgaattgatccttgaagccccaaaatctgaaattgaacgccttaaacaattggtgcccgaggttatggaacaggcaatcgaattacgtgtaccattgaaagtcgactatcacttcggccctacttggtacgacgctaag

SEQ ID NO: 492 - protein, 605 aa, synthetic construct
  REGION 1..605: note = Variant of DNA polymerase
MHHHHHHGGSGMLEQNEDPDVQTELANIDYETVEEVDETMLADEAALIVEVLEANYHKAPILGFALASEKKTLFIPTDVALSSPIFKAWLEDEKKKKSVFDAKRALVALKWQGIEMRGIDFDLLIASYLLNPSHSTDDVASVAKTKQYTEVQPDEAVYGKGAKQAIPDKKSLADHLVRKAVAIRALKREFVADLKANEQYLLLTELELPLTLILAEMEFTGVKVDVQRLRNMGEELNEQLKMIEQDIYQSAGQEFNINSPKQLGVVLFEKLQLPVIKKTKTGYSTSADVLEKLAPYHEIVEKILHYRQLGKLYSTYVEGLLKVVHQDTNKVHTIFNQALTQTGRLSSTEPNLQNIPIRLEEGRKIRQAFIPSEPDWVIFAADYSQIELRVLAHIANDQNLIEAFRNDLDIHTKTAMDIFHVSEEKVTSQMRRQAKAVNFGIVYGISDYGLSQNLNISRKEAAQFIERYFASFPGVKQYMEDIVRYAKQTGYVTTLLHRRRYLPDITSRNFNLRSFAERTAMNTPIQGSAADIIKKAMIDLAERLKQEELQARILLQVHDELILEAPKSEIERLKQLVPEVMEQAIELRVPLKVDYHFGPTWYDAK

SEQ ID NO: 493 - DNA, 1809 bp, synthetic construct
  misc_feature 1..1809: note = Variant of DNA polymerase
  source 1..1809: mol_type = other DNA
atgcatcaccatcaccatcacggtggcagcggtatgattggtcaacgtgcgcacgaaaaaaccaatctgagcgatgtgtcctttgtcacagtacaggcaatcgaagaacacatgctgacgaaagaatcggcgttagtggtggaggtaatggacgccaactatcatcgcgctccgattttgggcttcgccctggcaaacgagcgtggctacttctttatcccaactgatgtcgccttcgcaagtaccgcatttcgcacgtggctggaagatgaacagtgcaagaagtcagtgttcgacgcgaaacgcgcgattgtcgcccttaaatggcatggtatcgaactgaaaggcgtggattttgatctgttgcttgctgcctatctgctgaatccgaccgatgcaaatggagacgtcgcggccatcgccaagaccaaacagtacactgacgttcaaagcgatgaggaggtgtatgggaaaggtgcaaaacaggcggtaccctcagtcaacgtgctcgccgaacatctcgtacgtaaagcgaaagcgattctctcgctgaaagaaacctacattcacgaactgaaacaaaacgaacagtttgagctgcttacgaacttagaactccctctgacatttattttaggagagatggaatttcgcggcgtgaaagtggacgtcgaacgtctccagcacatgggcaaggaattcgctgctcaactgcatcagatcgaacagcgcatctatgaactggcaggtaccaccttcaatattaacagcccaaaacagctgggtaccattctgtttgaaaaacttcaattgccggtggtgaagaagacgaagacgggctattctacaagtgctgatgtcctggagaaattagctccgcaccatgagatcatcgaacaaatccttcattaccgtcagctcgggaaactgcagtccacgtacgtagaagggctgatgaaagtcgtacgccaagataccggcaaagtgcataccatttttcagcaggccctgacgcaaacgggacgtttatcgagcaccgaacctaatctgcagaacattcccattcgcattgaagaagggcgtaaaattcgccaggcattcgtcccatcatttgatgactgggtgatctttgccgccgactattctcaaatcgagttacgtgtcctggcacacattgcaaacgatgacaatttaatcgccgctttccatcaggaccttgatatccacacgaagacagccatggatatttttcatgtagcagaggacgaggtaaccgctcatatgcgccgccaggcaaaagccgtaaactttggtattgtctacggtatctccgattatggtctgagccaaaatctgggcatcacccgtaaagaagccgccgaattcattgaacgctatttccactcttatccgggcgtcaagaaatacatggaggaaattgtgcaggacgccaaacagaaaggatacgtaaccacactgcttcatcgtcgtcgctatctcccggatatcacgagctccaattttaacgtccgttcgttcgcagaacgcaccgcaatgaacaccccgattcaaggcagtgcagccgatatcatcaagaaagcaatgattgatctcgctgaacgtttacgcgaagaacgtatgcaagctcgcttactgctccaagtgcacgacgaactgattcttgaagcaccgaaagaggaaatcgagcgcctgaagaacattgtgccggatgtaatggaacacgctgtctcattacgtgtgccactgaaagtcgattatcatttcggtcctacatggtacgacgctaag

SEQ ID NO: 494 - protein, 603 aa, synthetic construct
  REGION 1..603: note = Variant of DNA polymerase
MHHHHHHGGSGMIGQRAHEKTNLSDVSFVTVQAIEEHMLTKESALVVEVMDANYHRAPILGFALANERGYFFIPTDVAFASTAFRTWLEDEQCKKSVFDAKRAIVALKWHGIELKGVDFDLLLAAYLLNPTDANGDVAAIAKTKQYTDVQSDEEVYGKGAKQAVPSVNVLAEHLVRKAKAILSLKETYIHELKQNEQFELLTNLELPLTFILGEMEFRGVKVDVERLQHMGKEFAAQLHQIEQRIYELAGTTFNINSPKQLGTILFEKLQLPVVKKTKTGYSTSADVLEKLAPHHEIIEQILHYRQLGKLQSTYVEGLMKVVRQDTGKVHTIFQQALTQTGRLSSTEPNLQNIPIRIEEGRKIRQAFVPSFDDWVIFAADYSQIELRVLAHIANDDNLIAAFHQDLDIHTKTAMDIFHVAEDEVTAHMRRQAKAVNFGIVYGISDYGLSQNLGITRKEAAEFIERYFHSYPGVKKYMEEIVQDAKQKGYVTTLLHRRRYLPDITSSNFNVRSFAERTAMNTPIQGSAADIIKKAMIDLAERLREERMQARLLLQVHDELILEAPKEEIERLKNIVPDVMEHAVSLRVPLKVDYHFGPTWYDAK

SEQ ID NO: 495 - DNA, 1809 bp, synthetic construct
  misc_feature 1..1809: note = Variant of DNA polymerase
  source 1..1809: mol_type = other DNA
atgcatcaccatcaccatcacggtggcagcggtatgattggtaattctttacatgaacagcgttcactgaccaacgtgagctttgtcacggtacaaacaatcgaagaacacatgctgaccgaggaatcggcgttggtggttgaggtgctcgatgccaactatcatcaggccccgattttaggcttcgcgctggtcaatgaacgcggccacttcttcattccaacggacgtggcctttgcatcctccatctttcgcacttggctggaaaacgaacgctgcaagaaatcggtgttcgatgcaaaacgtgcgattgtagctctcaaatggcatggaatcgagctgaaaggtgtagactttgatctgttgttggctgcataccttctgaatccgaccgatgcaaacggtgatgtggctgcggtcgccaagaccaaacagtatactgacgttcaaagcgatgaagaagtatacggaaaaggcgcgaaacagaccatcccgcctacaaatgttcttgccgagcacctggtgcgtaaagcgaaggctattgcaagcctgaaagaaacctatatccatgaactgaaacaaaacgaacagtttgagctcctcattcatttagaattgcccctgacttttattttagcgcagatggaatttcacggcgtgaaagtcgacgtcaatcgcctgcaagacatgggcaaagaattcaccgcccaactgcagcagatcgagcaacgtatctacgagttagcgggtacaacattcaacattaacagtccaaaacagttaggtaccattctgtttgaaaaacttcagctgccgatcgttaagaagacgaagaccgggtattcaaccagtgccgatgtgctcgagaaacttgctccgtaccatgaaatcatcgaacaaattctccactatcgccaattgggtaaattgcagtctacctatgttgaagggttgatgaaagtcgtgcgtcaagatacgggcaaagtccataccatttttcagcaggcattgactcaaaccggtcgcctctcgagcaccgaacctaaccttcaaaacattcccattcgtatcgaagaaggccgcaaaattcgtcaggccttcgttccgagtttcgatgactgggtaatctttgccgcggattactcacaaattgaattacgtgtcctcgcacacattgcaaatgatgagaatttaatcgctgcctttcatcatgaccttgatatccacacaaagactgccatggatattttccatgtgaaagaggaggaagtaaccgcacatatgcgtcgccaggctaaagccgtgaactttggtattgtctatgggatctctgattacggtttgagccaaaacttaggcatcacacgcaaagaagctgcagaattcattgaacgctattttcagtcgtatccgggagtgaaacgttacatggaggagattattcaggacgccaaacagaaaggctacgtcactacccttcttcaccgccgccgctatctcccagacatcacctccaacaacttcaatatccgtagcttcgccgaacgcaccgccatgaacactccgatccaaggaagtgccgcagacatcattaagaaggcaatgattgaccttgctacccgtttgcacgaagaacgtttacaggctcgcttattgctccaggtgcacgatgaacttatcctcgaagcaccgaaagaggaaattgacctcctcaagaaattagtaccggatgtgatggaaaatgccgtttcattacgtgtaccgcttaaagtcgattatcattttggtcctacatggtacgacgctaag

SEQ ID NO: 496 - protein, 603 aa, synthetic construct
  REGION 1..603: note = Variant of DNA polymerase
MHHHHHHGGSGMIGNSLHEQRSLTNVSFVTVQTIEEHMLTEESALVVEVLDANYHQAPILGFALVNERGHFFIPTDVAFASSIFRTWLENERCKKSVFDAKRAIVALKWHGIELKGVDFDLLLAAYLLNPTDANGDVAAVAKTKQYTDVQSDEEVYGKGAKQTIPPTNVLAEHLVRKAKAIASLKETYIHELKQNEQFELLIHLELPLTFILAQMEFHGVKVDVNRLQDMGKEFTAQLQQIEQRIYELAGTTFNINSPKQLGTILFEKLQLPIVKKTKTGYSTSADVLEKLAPYHEIIEQILHYRQLGKLQSTYVEGLMKVVRQDTGKVHTIFQQALTQTGRLSSTEPNLQNIPIRIEEGRKIRQAFVPSFDDWVIFAADYSQIELRVLAHIANDENLIAAFHHDLDIHTKTAMDIFHVKEEEVTAHMRRQAKAVNFGIVYGISDYGLSQNLGITRKEAAEFIERYFQSYPGVKRYMEEIIQDAKQKGYVTTLLHRRRYLPDITSNNFNIRSFAERTAMNTPIQGSAADIIKKAMIDLATRLHEERLQARLLLQVHDELILEAPKEEIDLLKKLVPDVMENAVSLRVPLKVDYHFGPTWYDAK

SEQ ID NO: 497 - DNA, 1800 bp, synthetic construct
  misc_feature 1..1800: note = Variant of DNA polymerase
  source 1..1800: mol_type = other DNA
atgcaccatcatcatcatcatggcggtagcggcacccaggaaacggaagtgcagccgctggagaaactggaataccagactgtggaggaaatcactgaagacctgttcgaacaggaaaacagcttttatctggaaatgatcggtgagaattactttatcagcgacattgttggcatggctgtccagaacgaaaaaggtattttctacctgccgaccgaatctactctgaaatccccggtattcaagaaatgggctgaagacgagacgaaaaagaaaaccgttttcgatgccaaacgtaccgtaatcgctctgcgtcgccatggcatcgaactgaaaggcatcgagttcgatctgctcctggcgtcttatctgatcaacccgtccgaatctccttctgacttcgctgatgtagctaaactgcacggcttcaacgaagtgcagagcgacgaggctgtatatggcaagggtgcaaaactgaaactgcctgatcgcgaaatttatgaagagcatatcgcgcgtaaagcggtaggtctgactaaactggctgaaacctgtcgtgacgtgctgaaagaaaacgatcagctgagcctgttctacgacctggaaatgccgctggcactcatcctggcggatatggagtggaccggtgtaaaagtagacgtggaccgcctgactgaaatgggtgacgagctgcacaatcgcctccaggaaatcgagaaggaaatctacgaactggcgggtcaggagttcaacatcaactctccaaagcagctgggtcacatcctgttcgaaaagatgggcctgccggttatcaagaaaaccaagaccggttattccacctccgccgacgttctggaaaaactggaaagctcccacgaaattgtacgttacatcctggaataccgtcaactgggcaaactgcagagcacctatatcgacggcctcctgaaagtggttcaccagaacacccacaaagttcatactcgcttcaaccaggcgctgactcagaccggtcgcctgagctctgcggatccgaacctgcaaaacattccaatccgcctggaggaaggtcgcaagattcgtcaggcattcgtgccgtctgaaaaggattgggttattttttccgcagactactctcagatcgaactgcgtgttctggcacatatcagcggcgaccagaaactgatcgaagcgttccgtgaagacatggatatccacaccaaaaccgccatggatgtatttcatgtacagaaagaggaagtgacctctaacatgcgccgtcaggcgaaagcagttaactttggtattgtctacggcatcagcgattacggtctgagccagaacctcggcatcacccgcaaagaagccggccagttcatcgaacgctattttgcttcctacccggatgtgaaggaatatatggatgaaattgtccgtgaggctaagcgtaagggctacgtgactaccctcctgcaccgtcgccgttatctgccggaaatcacgtcccgtaacttcaatgtacgttccttcgccgaacgcaccgcgatgaacactccgatccagggctccgcggctgatattatcaaaaaggccatgattgatatggccgaacgtctgaagaaagaacagctgaaatcccgtatgctcctgcaggtacatgacgaactgatcttcgaagtgccaccggatgaaattgaaaccatgaagaaaatcgtgccggacgttatggaacacgcggtcgaactgaaagtcccgctgaaagtagactacgcttatggtccgacctggtatgacgcgaaa

SEQ ID NO: 498 - protein, 600 aa, synthetic construct
  REGION 1..600: note = Variant of DNA polymerase
MHHHHHHGGSGTQETEVQPLEKLEYQTVEEITEDLFEQENSFYLEMIGENYFISDIVGMAVQNEKGIFYLPTESTLKSPVFKKWAEDETKKKTVFDAKRTVIALRRHGIELKGIEFDLLLASYLINPSESPSDFADVAKLHGFNEVQSDEAVYGKGAKLKLPDREIYEEHIARKAVGLTKLAETCRDVLKENDQLSLFYDLEMPLALILADMEWTGVKVDVDRLTEMGDELHNRLQEIEKEIYELAGQEFNINSPKQLGHILFEKMGLPVIKKTKTGYSTSADVLEKLESSHEIVRYILEYRQLGKLQSTYIDGLLKVVHQNTHKVHTRFNQALTQTGRLSSADPNLQNIPIRLEEGRKIRQAFVPSEKDWVIFSADYSQIELRVLAHISGDQKLIEAFREDMDIHTKTAMDVFHVQKEEVTSNMRRQAKAVNFGIVYGISDYGLSQNLGITRKEAGQFIERYFASYPDVKEYMDEIVREAKRKGYVTTLLHRRRYLPEITSRNFNVRSFAERTAMNTPIQGSAADIIKKAMIDMAERLKKEQLKSRMLLQVHDELIFEVPPDEIETMKKIVPDVMEHAVELKVPLKVDYAYGPTWYDAK

SEQ ID NO: 499 - DNA, 1809 bp, synthetic construct
  misc_feature 1..1809: note = Variant of DNA polymerase
  source 1..1809: mol_type = other DNA
atgcatcaccatcaccatcacggtggcagcggtatgctggggaagattgagaaagaagaaaaaccgttgaacgaaatcacctatacaacggtgaccgaagtaaccgatgatatgctgactaatgattgcgcgttagtggtcgaagtcatcgaatccaactatcatcaggcaccaattgtaggctttgccattgtgaacgagaaaggtaacttcttcattccgacggacgtggcgatgaaaagcgccgccttcaaacaatggctggaggacgaagaatgtcgcaagtcggtatttgacgcaaagcgtgctatcgtgagtcttaaatggcagggcatcaatctgaaaggcattgattttgatttgttacttgcatcatacctcatcaatccttctgaaagcacggatgacgtcgctagcgtcgccaagaccaaacagtacacagacgtgcaatcggatgaagcgatctatggaaaaggtgcaaaacaagcggtgccgagtgaagaggtactcgccgaacacttagtgcgcaaagccaaagctattgcctcgcttaaagaaacctttattaacgaactcaagagtaatgaacagtacgaactctttacgaacctcgaattgccgttaacctttattttggcagagatggaattcaacggtgtctcagtagatgtagcccgtttacaggctatgggcgaggagttcaccgaacaactcaaacagattgagcaggaaatctatgagttagcaggtacggaattcaatatcaacagccccaaacaattgggcgttattttgtttgaaaaacttcagctcccagtgatcaaaaagactaagacagggtactcgacttctgccgatgtcctcgagaaactcgctgatcagcatgaaatcatcggcaaaattcttcactatcgtcagctcggcaaactccaatccacgtatattgagggcctgatcaaagtcatccgcccggacacgggaaaagtccataccatttttaatcaggccttaacacaaactggccgcttatctagcacggaacccaacctccaaaacattcctattcgtttggaagaagggcgcaagattcgtcaggcttttattccgtcggaaccgaactgggtgatttttgctgcagattactcacagattgaacttcgcgtcttagcacacattgcaaatgacgaaaatttgattgaagccttcaaacaggacttagacatccatactaagacggccatggatatcttccatgtgcgtcaggaggaagtaacaagtaatatgcgccgccaggctaaagctgtgaactttggtattgtgtatggaatctcagattacggtttgagccaaaacctcggcatcactcgtaaagaagccgcccagtttatcgaacgttatttccaatcgtatccaggagtcaaacagtacatggaagatattgtgcaggaagccaaacagaaagggtacgtcaccaccctcttacaccgccgccgctatcttccggatatcacaagcaagaatttcaaccttcgttcattcgcagaacgcacggcaatgaacactccgatccaaggatcagccgccgacatcattaagaaggcaatgatcgacctcgctaaccgcttgaaaaaagaacgccttaaagctcgcattttgcttcaagtgcatgacgaattgatccttgaagcaccacaggaagaggtagaaaaactcaaagaaattgtgccggaggtaatggaacatgccatcgaattaaaagtgccgttgaaagtcgattatcatttcggccctacatggtacgacgctaag

SEQ ID NO: 500 - protein, 603 aa, synthetic construct
  REGION 1..603: note = Variant of DNA polymerase
MHHHHHHGGSGMLGKIEKEEKPLNEITYTTVTEVTDDMLTNDCALVVEVIESNYHQAPIVGFAIVNEKGNFFIPTDVAMKSAAFKQWLEDEECRKSVFDAKRAIVSLKWQGINLKGIDFDLLLASYLINPSESTDDVASVAKTKQYTDVQSDEAIYGKGAKQAVPSEEVLAEHLVRKAKAIASLKETFINELKSNEQYELFTNLELPLTFILAEMEFNGVSVDVARLQAMGEEFTEQLKQIEQEIYELAGTEFNINSPKQLGVILFEKLQLPVIKKTKTGYSTSADVLEKLADQHEIIGKILHYRQLGKLQSTYIEGLIKVIRPDTGKVHTIFNQALTQTGRLSSTEPNLQNIPIRLEEGRKIRQAFIPSEPNWVIFAADYSQIELRVLAHIANDENLIEAFKQDLDIHTKTAMDIFHVRQEEVTSNMRRQAKAVNFGIVYGISDYGLSQNLGITRKEAAQFIERYFQSYPGVKQYMEDIVQEAKQKGYVTTLLHRRRYLPDITSKNFNLRSFAERTAMNTPIQGSAADIIKKAMIDLANRLKKERLKARILLQVHDELILEAPQEEVEKLKEIVPEVMEHAIELKVPLKVDYHFGPTWYDAK

SEQ ID NO: 501 - DNA, 1809 bp, synthetic construct
  misc_feature 1..1809: note = Variant of DNA polymerase
  source 1..1809: mol_type = other DNA
atgcatcaccatcaccatcacggtggcagcggtatggcagcaccggcggctgaaggtgagaaaccgctggaagaaatggagtttgcgattgtggacgtaatcaccgaagaaatgctcgcggataaagcggcgttagtggtcgaggttatggaagaaaactatcatgacgcaccaatcgtgggcattgcactggttaatgaacacggtcgtttcttcatgcgtccggaaacggcattggctgattcccagtttcttgcttggctggcggacgaaaccaagaagaagtcaatgttcgatgcaaaacgtgcggtcgtcgctctgaaatggaaaggaattgaattacgcggtgtggcctttgatctgttgctcgcagcataccttttgaacccagcgcaagatgcgggcgatatcgcagcggtggcgaaaatgaaacagtatgaagctgtacgtagcgatgaggcggtctacgggaaaggtgtaaaacgctcgctgcccgacgaacagacactcgctgaacatttagtgcgtaaagctgctgcgatttgggcacttgaacaaccgtttatggatgacctccgcaataatgaacaggaccagctcctgacgaaacttgaacaacctttggcagcgatcttagcggagatggaatttaccggagtaaacgtggacactaagcgcttggaacagatgggctctgagcttgcagaacaacttcgcgccattgaacaacgcatctatgaattagcgggccaggaattcaacattaacagcccgaaacagttgggtgtcattctcttcgagaaacttcaactcccggtgctcaagaagactaagaccggctacagtacgagcgcagatgtacttgagaaattagcacctcaccacgagatcgtcgaaaacatccttcattatcgtcaactcggcaaattacagtccacatatattgaagggctgttaaaagttgtgcgcccagatacgggtaaggtccataccatgtttaatcaggctttgactcaaaccggtcgtttaagtagcgcggaacccaacctccaaaatattcctattcgtttggaagaagggcgcaaaattcgtcaggcttttgtgccatcagaacctgactggttaatctttgctgcggattactcgcagattgaacttcgcgttctcgcgcatattgcagacgatgacaacttaatcgaagcattccaacgtgaccttgatatccacacgaagacagcgatggatatcttccatgtgagtgaggaggaagtgaccgcaaatatgcgtcgccaggctaaagctgtgaactttggcattgtctatggaatctctgattatggcctcgctcaaaacctcaatatcacgcgcaaagaagcggcggagtttattgaacgttacttcgcatcctttcccggcgtcaaacagtacatggaaaacattgtacaggaagcgaaacagaaagggtacgtaaccaccctcttacaccgccgccgctatttaccagatatcaccagccgcaatttcaatgtccgttcgttcgcagagcgcacggcgatgaacacccccattcagggttcggcagcagatatcatcaagaaggcgatgatcgacttagctgcgcgcttgaaagaggaacaattacaagcacgcctcttattacaagtgcatgacgaacttatcttagaagcgccaaaagaggaaattgagcgtctctgcgaattggtgcccgaggtaatggaacaggctgtaacacttcgcgtcccattgaaagtcgattatcattacggccctacgtggtacgacgcgaag

SEQ ID NO: 502 - protein, 603 aa, synthetic construct
  REGION 1..603: note = Variant of DNA polymerase
MHHHHHHGGSGMAAPAAEGEKPLEEMEFAIVDVITEEMLADKAALVVEVMEENYHDAPIVGIALVNEHGRFFMRPETALADSQFLAWLADETKKKSMFDAKRAVVALKWKGIELRGVAFDLLLAAYLLNPAQDAGDIAAVAKMKQYEAVRSDEAVYGKGVKRSLPDEQTLAEHLVRKAAAIWALEQPFMDDLRNNEQDQLLTKLEQPLAAILAEMEFTGVNVDTKRLEQMGSELAEQLRAIEQRIYELAGQEFNINSPKQLGVILFEKLQLPVLKKTKTGYSTSADVLEKLAPHHEIVENILHYRQLGKLQSTYIEGLLKVVRPDTGKVHTMFNQALTQTGRLSSAEPNLQNIPIRLEEGRKIRQAFVPSEPDWLIFAADYSQIELRVLAHIADDDNLIEAFQRDLDIHTKTAMDIFHVSEEEVTANMRRQAKAVNFGIVYGISDYGLAQNLNITRKEAAEFIERYFASFPGVKQYMENIVQEAKQKGYVTTLLHRRRYLPDITSRNFNVRSFAERTAMNTPIQGSAADIIKKAMIDLAARLKEEQLQARLLLQVHDELILEAPKEEIERLCELVPEVMEQAVTLRVPLKVDYHYGPTWYDAK

SEQ ID NO: 503 - DNA, 1815 bp, synthetic construct
  misc_feature 1..1815: note = Variant of DNA polymerase
  source 1..1815: mol_type = other DNA
atgcatcaccatcaccatcacggtggcagcggtatgctgggtgaaaccccggaaactggagaacaggtggaggtcgaagcgctcgaggtgaagaaaatgacggatgtaaccgacgagatgcttacagatcacgccgcattggttgttgaacaactcggcgacaactatcatgaagcggatctcattgggtttgccatccacaatgaaaacggcgcattcttcatcacgaaagaagatgccttacagagcgacgcctttaaacaatgggtacaggacgagaccaagaaaaaatgggtcttcgactcgaaacgtgcagttgtcgctttacgctggcatgatgtcgatttgaaaggcgtggataatgacgtgcttcttgcatcatacgttgttaacccacagaagagttatgaagatgtagcgtccgtggccaaagaatacggcttaaacattgcgtttagcgatgagaaagtctatgggaagggtgcgaaacaagctattccgccggaagacgaactcaaagagcatttgggacgcaaagcggctgcgatctcagcacttcacgatttaacattagaagcgctcgaaaagaatgatcagcatgaattgtacgaggaccttgaattaccactcgcattgattttgggtgaaatggaatcgctcggcgtgaaagtagatatcgaacgcctcgagaaaatgggtgaagaactcgccaagaaactcaaagagtatgaagaaaccattcatcgtttagcgggtgaaacctttaatattaacagccccaaacaattgggcgttattctctttgagaaattaggattaccgatcatcaagaagactaagacgggctattcaacgagtgctgacgtgcttgagaaactcgaagataaacacgaaattatccgttccatccttcattaccgtcagattggcaaactccagtcgacctatgtcgaagggttgatgaaagtaacgcgcaaagacacacacaaagttcatacccgcttcaatcaggccttaactcaaactggccgtttatcgagcaccgaccctaacctccaaaacattcctattcgtttggaagaagggcgcaagattcgccaggcttttgtgccgagtaaagagggctggttaatgtttgccgccgattactcgcagatcgaacttcgtgttttagcacacattagtcaggatgaaaatttgatcgaagcattcacccaggacatggatatccacacgaaaacggcaatggatgtgttccatgtgagcgaggaggaagttaccagctccatgcgccgccaggcaaaagccgtgaactttggcattgtctatgggatctcagattacggactctcccagaacctcggcatcacacgtaaagaagccgccgcattcattgaacgctatctcacctcgtttaaaggcgtcaaaacgtatatggaggaaatcgtgcaagaagccaaacagaaaggatacgtcaccacactccttaaacgtcgccgttatatcccggatattacctcccgcaatttcaacattaaatcgttcgctgaacgcacggccatgaacaccccgattcaagggtcagcagcagatatcattaagaaggcaatgattgatatggctcgcaaattgaaagaagaaaatctccaagccaatttactgctccaggtacatgacgagttaatctttgaggcaccaaaagaggaaattgcgatcctcgagaagattgtgcccgaagtgatggaaaacgcattacaattagatgtcccgttaaaagtggattttgccagcggaccttcatggtacgacgctaag

SEQ ID NO: 504 - protein, 605 aa, synthetic construct
  REGION 1..605: note = Variant of DNA polymerase
MHHHHHHGGSGMLGETPETGEQVEVEALEVKKMTDVTDEMLTDHAALVVEQLGDNYHEADLIGFAIHNENGAFFITKEDALQSDAFKQWVQDETKKKWVFDSKRAVVALRWHDVDLKGVDNDVLLASYVVNPQKSYEDVASVAKEYGLNIAFSDEKVYGKGAKQAIPPEDELKEHLGRKAAAISALHDLTLEALEKNDQHELYEDLELPLALILGEMESLGVKVDIERLEKMGEELAKKLKEYEETIHRLAGETFNINSPKQLGVILFEKLGLPIIKKTKTGYSTSADVLEKLEDKHEIIRSILHYRQIGKLQSTYVEGLMKVTRKDTHKVHTRFNQALTQTGRLSSTDPNLQNIPIRLEEGRKIRQAFVPSKEGWLMFAADYSQIELRVLAHISQDENLIEAFTQDMDIHTKTAMDVFHVSEEEVTSSMRRQAKAVNFGIVYGISDYGLSQNLGITRKEAAAFIERYLTSFKGVKTYMEEIVQEAKQKGYVTTLLKRRRYIPDITSRNFNIKSFAERTAMNTPIQGSAADIIKKAMIDMARKLKEENLQANLLLQVHDELIFEAPKEEIAILEKIVPEVMENALQLDVPLKVDFASGPSWYDAK

SEQ ID NO: 505 - DNA, 1818 bp, synthetic construct
  misc_feature 1..1818: note = Variant of DNA polymerase
  source 1..1818: mol_type = other DNA
atgcatcaccatcaccatcacggtggcagcggtatgttaggtgaaggaagcgcggaagcagaacaggatcaaagtctcgaggatatcaacgtgaaaacagtaaccgacgttacctccgatattcttgtgtcaccgtcggcttttgtcgtggaacaaatcggcgacaattatcatgaagaaccaattttgggcttcagcattgtaaatgaaactggtgcctacttcattcccaaagatacggcggtggagtccgaggtattcaaggaatgggtggaaaacgacgaccagaagaaatgggtcttcgactcaaaacgcgcagttgttgctttacgttggcagggcatcgaattgaaaggtgcggaatttgatacgttgcttgccgcctatattattaacccgggcaatagttacgatgatgttgcaagcgtggccaaagattatggattacacatcgtgtcgagcgatgagtcggtctacgggaaaggtgcaaaacgcgcggtaccgagtgaggacgtgctctccgaacatctcgggcgtaaagcgctcgccatccaatcattacgcgagaaattggtccaagagctcgaaaacaacgatcaactcgaattgtttgaggagcttgaaatgccactcgcccttattttgggtgaaatggaaagtaccggcgtgaaagttgatgtcgaccgcctcaaacgtatgggcgaggaattaggtgccaaactgaaagagtacgaagaaaaaatccacgaaattgcaggtgaaccctttaatattaacagcccaaaacagttaggcgtcattttgtttgaaaagatcgggttaccggtggtgaagaagaccaagacgggctattcaacaagcgctgatgtgcttgagaaactcgctgataaacatgatatcgtcgattatatccttcagtaccgtcagatcggcaagttacagtccacgtatattgaaggcctgttgaaagtaacacgtcctgactcgcacaaagtccatacccgctttaatcaggcactcactcaaactggccgcttatcgagtaccgatcctaacctccagaacattcctattcgtttagaagaagggcgcaaaattcgtcaggcttttgtacccagcgagaaagactggttaatctttgccgccgactactcacaaattgaacttcgtgttctcgctcacatcagcaaagacgaaaatttgatcgaagcattcaccaatgacatggacatccatacgaagacggcaatggatgtgttccacgtggcaaaagatgaagtaacctcagctatgcgccgccaggcaaaagccgtgaactttggtatcgtctatggaatctcggattacggcctcagccaaaacctcggtatcacccgtaaagaagctggcgcattcattgatcgttaccttgaatcgtttcagggagtcaaagcatatatggaagatagtgtgcaagaagccaaacagaaaggctatgtaaccacacttatgcatcgccgccgctatatcccggaattaacctcccgcaacttcaatattcgttcattcgccgaacgcacggccatgaacaccccaattcagggatcagccgccgacatcattaagaaggcaatgattgatatggccgccaagctcaaagagaaacagttaaaagcccgccttttattacaggtgcatgacgaattgatctttgaagcacctaaagaggagattgaaatcctcgagaaacttgtgccagaggtcatggaacatgcattggcattagatgtaccgttgaaagtggattttgcttcgggcccttcctggtacgacgctaag

SEQ ID NO: 506 - protein, 606 aa, synthetic construct
  REGION 1..606: note = Variant of DNA polymerase
MHHHHHHGGSGMLGEGSAEAEQDQSLEDINVKTVTDVTSDILVSPSAFVVEQIGDNYHEEPILGFSIVNETGAYFIPKDTAVESEVFKEWVENDDQKKWVFDSKRAVVALRWQGIELKGAEFDTLLAAYIINPGNSYDDVASVAKDYGLHIVSSDESVYGKGAKRAVPSEDVLSEHLGRKALAIQSLREKLVQELENNDQLELFEELEMPLALILGEMESTGVKVDVDRLKRMGEELGAKLKEYEEKIHEIAGEPFNINSPKQLGVILFEKIGLPVVKKTKTGYSTSADVLEKLADKHDIVDYILQYRQIGKLQSTYIEGLLKVTRPDSHKVHTRFNQALTQTGRLSSTDPNLQNIPIRLEEGRKIRQAFVPSEKDWLIFAADYSQIELRVLAHISKDENLIEAFTNDMDIHTKTAMDVFHVAKDEVTSAMRRQAKAVNFGIVYGISDYGLSQNLGITRKEAGAFIDRYLESFQGVKAYMEDSVQEAKQKGYVTTLMHRRRYIPELTSRNFNIRSFAERTAMNTPIQGSAADIIKKAMIDMAAKLKEKQLKARLLLQVHDELIFEAPKEEIEILEKLVPEVMEHALALDVPLKVDFASGPSWYDAK

SEQ ID NO: 507 - DNA, 1509 bp, synthetic construct
  misc_feature 1..1509: note = Variant of DNA polymerase
  source 1..1509: mol_type = other DNA
atgcatcaccatcaccatcacggtggcagcggtatgtcatatgcggcttttagcttcgatctgctgctcgccgcctacttattggacccggcacagggtgtggatgatgtagcggcggcagcgaaaatgaaacgctacgaagaagtgcgtccagatgaggcagtctatgggaagggcgcaaaacgcgctgtacctgatgaaccggtgcttgccgaacatctcgtgcgtaaagcggctgcgatttgggccttagagcgtccgtttcttgacgaattacgtcgcaacgaacaagatcgtttgctcgtcgaacttgaacagcctctttcctcgatcctcgcggagatggagtttgccggagtcaaagtcgacaccaagcgcttggaacaaatgggcgaagaattagccgaacaactgcgcacagtagaacagcgcatttatgagctcgcaggccaggaattcaatatcaacagcccaaaacaattgggtgtcattttgttcgaaaaactgcagttacccgtgctcaagaagacgaagaccggttactctacgagtgccgatgtgcttgagaaacttgctccataccacgagatcgtggaaaatatccttcattatcgtcaattgggtaagttgcagtcgacctatattgaagggctgttgaaagtagtacgcccggacacgaaaaaagtccacaccatttttaaccaggcattgactcaaactggccgtttatctagcacagaaccaaacctccaaaacattcccattcgcttagaagagggacgtaaaattcgtcaggcatttgtgccttcggaaagtgactggttaatcttcgctgccgattactcacagatcgaactccgtgtactcgcacatatcgctgaagatgacaatttgatggaagcctttcgccgtgaccttgatatccacacgaagactgccatggatatttttcaagtgagtgaggatgaagtcacccctaatatgcgtcgccaggcaaaagccgtgaacttcggcattgtctacggtatctccgattatggtctcgctcaaaacctcaatatcagccgtaaagaagccgccgagttcattgaacgctattttgaatcatttcccggcgtcaaacgttacatggagaacattgtgcaggaagcaaaacagaaagggtacgtaaccactctcttacatcgccgccgttatttacccgacattacgtcccgcaatttcaacgtccgttcgttcgcagagcgcatggccatgaacaccccaattcagggttcagccgcagacatcatcaagaaagcaatgatcgatttaaatgcccgcttgaaagaagaacgtcttcaggcacgccttcttctccaagtacatgacgaattaatcttagaggcaccaaaagaggaaatggaacgcttatgccgtttggtgccagaggtaatggaacaagctgtcacgttgcgcgtaccgttgaaagtcgattatcactacggtagtacatggtacgacgctaag

SEQ ID NO: 508 - protein, 503 aa, synthetic construct
  REGION 1..503: note = Variant of DNA polymerase
MHHHHHHGGSGMSYAAFSFDLLLAAYLLDPAQGVDDVAAAAKMKRYEEVRPDEAVYGKGAKRAVPDEPVLAEHLVRKAAAIWALERPFLDELRRNEQDRLLVELEQPLSSILAEMEFAGVKVDTKRLEQMGEELAEQLRTVEQRIYELAGQEFNINSPKQLGVILFEKLQLPVLKKTKTGYSTSADVLEKLAPYHEIVENILHYRQLGKLQSTYIEGLLKVVRPDTKKVHTIFNQALTQTGRLSSTEPNLQNIPIRLEEGRKIRQAFVPSESDWLIFAADYSQIELRVLAHIAEDDNLMEAFRRDLDIHTKTAMDIFQVSEDEVTPNMRRQAKAVNFGIVYGISDYGLAQNLNISRKEAAEFIERYFESFPGVKRYMENIVQEAKQKGYVTTLLHRRRYLPDITSRNFNVRSFAERMAMNTPIQGSAADIIKKAMIDLNARLKEERLQARLLLQVHDELILEAPKEEMERLCRLVPEVMEQAVTLRVPLKVDYHYGSTWYDAK

SEQ ID NO: 509 - DNA, 1821 bp, synthetic construct
  misc_feature 1..1821: note = Variant of DNA polymerase
  source 1..1821: mol_type = other DNA
atgcatcaccatcaccatcacggtggcagcggtatgtttgatgatggcacactgaccgaaaccaacgaaccgctcgaagacattcagttcgaaacagtgagcgaaatctccggtgacatgctgacggatacggaggccgcgctgtatgtcgaagtattgcaagaaaactaccatcaggctgcaattcaagggtttgccgtggtcaatagttctggctattattacgtcccaacgaatgtggccctgaaaagctcggacttcaaacagtggcttgagaacgcgaacaagaagaaatttgtgtacgatgcaaaacgcgcgaaagtagcgttaaaatggcagggtgtgaatctcgacggcatcacctttgatctgttactggcgtcctacattcttaacccgtcggagtcaggaatcaccgatgtcgcagatattgcccgtggtaaaggcttcaccagcgtacagagtaatgaagcggtgtatgggaaaggtgcaaagcaacaaattcctgatggccaggtattaggcgaacacctggtgcgcaaagccgccgcgatctatgcactcaaagaccagtttattcaggagctgaaagacaacgaacaacttgcgctgtatgaggaactggaaatgcccctgtctctgatcctggctgagatggaattcactggagtacaagtggacgtcgaacgtctccatacgatgggcgatgaattaaaacgccagctggatgaaatggaagctcaaatccacgagctggcaggcgtcaaattcaatattaacagcccgaagcagctgggtgaagtgctgtttgagaaacttaatttaccagtgattaagaagactaagaccggatactcaaccagtgccgatgtcctcgagaaactggccgataaacatgaaatcatcgaaattattcttcactatcgtcagctgggtaaattacagtccacttacatcgaagggctgctgaaagtggtacataacgacacgaacaaagtccatacccgctttaatcaggctctgacacaaaccggtcgtctgtcaagcaccgatcctaacctccaaaacattcccattcgcttagaagaaggccgtaagatccgccaggctttcatcccaagcgaggatgagtgggtaatttttgccgcagactactcgcagatcgaattacgtgtcctggctcacattgccaatgaccctaaactggtcgaagcatttcagaatgacatggatatccacacgaagacggcaatggatgtgttccatgtaaaagctgacgacgtcaccagtaatatgcgccgccaagctaaagccgtgaactttggtattgtctatgggatctcggattatggtctgtctcagagcctcggcatcactcgtaaagaagccggccagttcattgaacgttatctcgattcgtttccaggagtcaaagattacatggactccattattgaggaagccaaacagaatgggtacgtaaagacccttcttcaacgccgccgttacatccccgagatccattcccgcaactttaacatgcgttcgttcgcagaacgcacagcaatgaacaccccaattcagggttcagccgccgacatcattaagaaagcaatgattgatatggctgatcgtctgcagcaagaaaaattacaagctcgcttactgcttcaagtgcacgacgaactgatttttgaggcccccaaatcagaacttgagacgctgaagaagattgtgcccgaagtaatggagcaagctatccatttagccgtccctctgaaagtagattatgcattcggtgattcttggttcgactctaag

SEQ ID NO: 510 - protein, 607 aa, synthetic construct
  REGION 1..607: note = Variant of DNA polymerase
MHHHHHHGGSGMFDDGTLTETNEPLEDIQFETVSEISGDMLTDTEAALYVEVLQENYHQAAIQGFAVVNSSGYYYVPTNVALKSSDFKQWLENANKKKFVYDAKRAKVALKWQGVNLDGITFDLLLASYILNPSESGITDVADIARGKGFTSVQSNEAVYGKGAKQQIPDGQVLGEHLVRKAAAIYALKDQFIQELKDNEQLALYEELEMPLSLILAEMEFTGVQVDVERLHTMGDELKRQLDEMEAQIHELAGVKFNINSPKQLGEVLFEKLNLPVIKKTKTGYSTSADVLEKLADKHEIIEIILHYRQLGKLQSTYIEGLLKVVHNDTNKVHTRFNQALTQTGRLSSTDPNLQNIPIRLEEGRKIRQAFIPSEDEWVIFAADYSQIELRVLAHIANDPKLVEAFQNDMDIHTKTAMDVFHVKADDVTSNMRRQAKAVNFGIVYGISDYGLSQSLGITRKEAGQFIERYLDSFPGVKDYMDSIIEEAKQNGYVKTLLQRRRYIPEIHSRNFNMRSFAERTAMNTPIQGSAADIIKKAMIDMADRLQQEKLQARLLLQVHDELIFEAPKSELETLKKIVPEVMEQAIHLAVPLKVDYAFGDSWFDSK

SEQ ID NO: 511 - DNA, 1812 bp, synthetic construct
  misc_feature 1..1812: note = Variant of DNA polymerase
  source 1..1812: mol_type = other DNA
atgcatcaccatcaccatcacggtggcagcggtatgttaggcgcagatacggaagaagacctggaaccgattgaagatgtgcagtttgagatgctggtagaaatcgccgaagaacatttggcggatgaaagcgttctgattgtcgaagtgctcgacgacaactatcactcctcctcgatcattgggctcgcggtgatcaatgagaacggttcatactacgtgcctgctgaactggcggtgaaaagcgaagccttcaagaaatgggcagcagacggaaccaagcgcaagacagtatatgacgccaaacaatcaattgttgctttacattggcagggcatcgaattgaatgccgtagagtttgatgtactgcttgccgcctatatcttggatccgagccaaagtttcgcagatgcagcaggtgttgcccgtcactccggcatccatctggttcagagcgatgagactgtctacggaaaaggcgcaaaacgtgcgatcccagagaccgagaaactcgctgaacacttagtgcgcaaaggtctggcgcttaaagcggtgaaagaaaaattacagttgcagctcgaagaaaacgaacaacttgaactctatttgcaccttgaaatgccgctctcgatcattttagcggagatggaagctaccggcgtgagcgtggacattgaacgtctcgaagaaatgggtcgccagcttacggaccgccttatgacgctcgaagaaaccattcatcgtttggcgggtgaggccttcaatatcaacagtcccaagcaattaggctctattctctttgataaattaggattaccggcggcgaagaagactaagaccggctattcgacatcagccgatgtactcgagaaattagcagggaaacatgaaattgtccaggaaattcttcattaccgtcaacttggcaaattgcagtccacgtatattgaagggctgttgaaagtcgtgcacaaagatacgcgcaaagtccatactcgctacgtccagacactcacgcaaactggccgtttaagtagcacagatcccaacctccaaaacattcctattcgtttggaagaagggcgcaaaattcgccaggcctttgtaccgagtgagaaagattgggtgatgtttgctgcggactactcacaaattgaattacgtgttctcgcacatatcgctggcgaccgcaatttgatcgaagccttccgcaatgaccttgatatccacacgaagacagcaatggatgtgtttggtgtggaagctgatgcagtcacgagcaacatgcgtcgccaggctaaagccgtaaacttcggcattgtctatggaatctcggattacggcctcagccagtcgctcaacatcactcgtaaagaagccggcgagttcattaaacgttaccttgagtcatttgacggagtcaaagagtatatggaggaaattgtgcaggaagccaaacagaatgggtacgtcaagacccttcttcatcgccgccgctatatcccagagatcacttcccgcaattttaacgtccgttcgttcgccgaacgcacggccatgaacactccgattcaagggagtgccgcagatatcatcaagaaggcaatgattgatatggctgccaagttgaaagaagaaaaattacaaacccgccttttgcttcaggtacacgacgaattaatttttgaggcaccgaaagaagagattccggtgcttgagaaattagtgccacaggtaatggagcatgcagtcgagttaaaagtcccgttgaaagtggattatagctatggcagctcctggtacgacgctaag

SEQ ID NO: 512 - protein, 604 aa, synthetic construct
  REGION 1..604: note = Variant of DNA polymerase
MHHHHHHGGSGMLGADTEEDLEPIEDVQFEMLVEIAEEHLADESVLIVEVLDDNYHSSSIIGLAVINENGSYYVPAELAVKSEAFKKWAADGTKRKTVYDAKQSIVALHWQGIELNAVEFDVLLAAYILDPSQSFADAAGVARHSGIHLVQSDETVYGKGAKRAIPETEKLAEHLVRKGLALKAVKEKLQLQLEENEQLELYLHLEMPLSIILAEMEATGVSVDIERLEEMGRQLTDRLMTLEETIHRLAGEAFNINSPKQLGSILFDKLGLPAAKKTKTGYSTSADVLEKLAGKHEIVQEILHYRQLGKLQSTYIEGLLKVVHKDTRKVHTRYVQTLTQTGRLSSTDPNLQNIPIRLEEGRKIRQAFVPSEKDWVMFAADYSQIELRVLAHIAGDRNLIEAFRNDLDIHTKTAMDVFGVEADAVTSNMRRQAKAVNFGIVYGISDYGLSQSLNITRKEAGEFIKRYLESFDGVKEYMEEIVQEAKQNGYVKTLLHRRRYIPEITSRNFNVRSFAERTAMNTPIQGSAADIIKKAMIDMAAKLKEEKLQTRLLLQVHDELIFEAPKEEIPVLEKLVPQVMEHAVELKVPLKVDYSYGSSWYDAK

SEQ ID NO: 513 - DNA, 1815 bp, synthetic construct
  misc_feature 1..1815: note = Variant of DNA polymerase
  source 1..1815: mol_type = other DNA
atgcatcaccatcaccatcacggtggcagcggtatgtttgatacaggctcagaaactgatgaaccggaggagattgaagacctgccatttacggcggcggaagaaatcaccgatgaaatgttagtggacgactcgattttcgtagttgaggtgtggaacgaaaattatcatcgctctgatatcgcaggattcgccattatcaacgaaaatggtcgtttctacctgccttatggcttggctatggattccggtcccttccgtaaatgggcagaagacgaacacatgcgcaagacggtatttgacgccaaacgttcaatcgtggccatgaaatggaaaggcattgaactggcaggtgttgattttgatgttctcctcgcctcctatattctggatgcgtcgcagaccgtggaggatgtcgcggggatcgcgaagatgaaaggaattaccggcgctaaaaccgatgagtctgtctacagtaaaggcgccaaacgcaaactgccggaagatgcagtgcttgctgatcatctggtgcgtaagggtgaagcgctgtcgaaactgtccaagatcttggagaaagaactgcgcgaaaacgatcaatacgaattatatcacgaccttgaaatgccgctggccattattctggggaagatggaagcgatcggagtaaaagtcgacgtcaacaaactgaaagaaatgggcgcggacttaggtcaacagttacaggcactcgagaataagattcatgggttggccggtgaatcatttaatatcaacagtccaaagcagctgggcgttattctgtttgagaaattgggtttgccgccggtgaagaagacgaaaaccggctactctacgagtgctgatgtgctcgagaaacttgcagatcgccacgagatcgtcgaacagattctcctctatcgtcaacttggcaaactgcagtccacatatatcgaaggcctgctgaaagtggtacatgaagacacccataaagtccacacccgcttcaaccaggctctgacgcaaaccggtcgtctgtcatctacagatcccaatctgcagaacatccctattcgcctggaagaagggcgtaaaattcgcgaggcctttgtcccgagtaaagaaggctgggtgattttcgcagcggactactcgcaaatcgagttacgtgtactggcgcatattgcccaggacaagaatttgatggaagcatttcgcaacgatatggacgtgcacacgaaaacagcgatggatgtatttcacgtggaaatggatgaagtcaccagtaatatgcgtcgtcaggcgaaagccgtaaacttcggtattgtctatgggatctcagattacggcctttcccagagtctgggtatcacgcgcaaagaagctgcggagttcatctctcgttatctggaatcatttgacggagtgaaagagtatatggatgatattgtgcgcgacgcgaaacagaaaggttacgtttctacccttcttcaacgccgccgttatctgccggaaatcacctcccgcaatttcaacctccgttcgtttgccgaacgcacggcaatgaacaccccaattcaaggttccgctgctgacatcattaagaaagcgatgattgatatggcacgtgagttagaagaacaaggcctgcaatccaatttactgcttcaggtgcacgacgaactgatttttgaagcaccgccggaggagatcgaaatcctcaagaaattagtaccacaggtcatggaacatgccgtggaacttgatgtcccgctgaaagtggattacgcttatggtgattcatggtacgacgctaag

SEQ ID NO: 514 - protein, 605 aa, synthetic construct
  REGION 1..605: note = Variant of DNA polymerase
MHHHHHHGGSGMFDTGSETDEPEEIEDLPFTAAEEITDEMLVDDSIFVVEVWNENYHRSDIAGFAIINENGRFYLPYGLAMDSGPFRKWAEDEHMRKTVFDAKRSIVAMKWKGIELAGVDFDVLLASYILDASQTVEDVAGIAKMKGITGAKTDESVYSKGAKRKLPEDAVLADHLVRKGEALSKLSKILEKELRENDQYELYHDLEMPLAIILGKMEAIGVKVDVNKLKEMGADLGQQLQALENKIHGLAGESFNINSPKQLGVILFEKLGLPPVKKTKTGYSTSADVLEKLADRHEIVEQILLYRQLGKLQSTYIEGLLKVVHEDTHKVHTRFNQALTQTGRLSSTDPNLQNIPIRLEEGRKIREAFVPSKEGWVIFAADYSQIELRVLAHIAQDKNLMEAFRNDMDVHTKTAMDVFHVEMDEVTSNMRRQAKAVNFGIVYGISDYGLSQSLGITRKEAAEFISRYLESFDGVKEYMDDIVRDAKQKGYVSTLLQRRRYLPEITSRNFNLRSFAERTAMNTPIQGSAADIIKKAMIDMARELEEQGLQSNLLLQVHDELIFEAPPEEIEILKKLVPQVMEHAVELDVPLKVDYAYGDSWYDAK

SEQ ID NO: 515 - DNA, 1800 bp, synthetic construct
  misc_feature 1..1800: note = Variant of DNA polymerase
  source 1..1800: mol_type = other DNA
atgcaccatcatcatcatcatggcggtagcggcagcgaagaccgctccgaatctttcgaggatattcacttcgaggttctgaccgaaatccgtccggagcatttcaccgaacgtatggccctgtacgtggagatgctggaagacaactaccacgacggtaaaatcctcgcggtttcctggggtaccgagaaaaacatctatacggctagcctggaaaccgtcatggcctctccggcgttcaaagaatgggccgaaaacgcggaagctcacaaaattgtctatgatggtaaacgtaccatggttatgctgcactacgctggtatcgctctggctggcatcgatttcgatatcctcctggcctcttatatcctgaacgcgaaagacaattccaaagatctggcgcaagttgcccaggaatacggctataatgacgtatccttcgatgaggctatttatggtaaaggtgctaaaactgcggttcctgaggacactgtactgcacgaccatctggcacgtaaagtgaaggcaattcaggcgctgttcgctcagctgaacgcggagctggaaagcaacgtacagaaggatctgtattacgagatggaactgccgctgagcttcgtgctggcgcacatggaaatccagggcatcaaagttgaaccgcagcgcctgctcactatgaaagaagagttcgccggtcgtctcctggaaatcgagaaaactatttacgcggaagcgggtgaagagttcaacatcaactctccgaaacagctgggcgtcattctgttcgaaaaaatgggtctcccggctatcaaaaagactaaaactggctactccaccgcggtggacgtcctcgaaaaactccaggcccaagctccgatcgtggaacacatcctgaactatcgccagctggcgaaactgcagtctacctacgtagaaggtctgctcaaattcattaaaccggaaactggtaaaatccacactcgttatcaacagactctgactcaaacgggtcgcctctcctctgttgatccaaatctgcagaatatccctatccgtatggaggaaggccgcaaaatccgccaggcgttcgtgccgcaacaggaaggctggaagctgtttgcgtccgactatagccagatcgaactgcgcgttctggcccatatttccggcgatgaacatctgcaggaggctttcctggaaggtcaagacattcacactagcactgctatgcgtgtcttcggtatcgaaaatccggaagatgtgaccgccaacctgcgccgtcaggcgaaagcggtgaactttggtgtcgtttacggtattagcgactatggtctgagccagaacctgaacatcacccgtaaagctgcgcaggagttcatcgatcgctacttcgagaaatacccgggcgttaaacagttcatggaagacatcgttaaagaagctaaagaaaccggttacgtagaaaccctgtttcaccgccgtcgctacctgccagacatccacaaccgtaacttcaacctgcgtagcttcgcggaacgcaccgcaatcaattcccctattcagggcactgccgcagacattatcaaggttgcaatggtccgtatggacaaggcgctgaaagagaaaggtctgcaggcgaacatgctcctgcaggtccacgacgaactgatctttgaatgtccggaagaggaaatcccggtactggaaaaactggtgccagaaatcatggaacacgcggttagcctggctgtgccactgaaggttgattccaacttcggtgattcttggtatgaagccaaa

SEQ ID NO: 516 - protein, 600 aa, synthetic construct
  REGION 1..600: note = Variant of DNA polymerase
MHHHHHHGGSGSEDRSESFEDIHFEVLTEIRPEHFTERMALYVEMLEDNYHDGKILAVSWGTEKNIYTASLETVMASPAFKEWAENAEAHKIVYDGKRTMVMLHYAGIALAGIDFDILLASYILNAKDNSKDLAQVAQEYGYNDVSFDEAIYGKGAKTAVPEDTVLHDHLARKVKAIQALFAQLNAELESNVQKDLYYEMELPLSFVLAHMEIQGIKVEPQRLLTMKEEFAGRLLEIEKTIYAEAGEEFNINSPKQLGVILFEKMGLPAIKKTKTGYSTAVDVLEKLQAQAPIVEHILNYRQLAKLQSTYVEGLLKFIKPETGKIHTRYQQTLTQTGRLSSVDPNLQNIPIRMEEGRKIRQAFVPQQEGWKLFASDYSQIELRVLAHISGDEHLQEAFLEGQDIHTSTAMRVFGIENPEDVTANLRRQAKAVNFGVVYGISDYGLSQNLNITRKAAQEFIDRYFEKYPGVKQFMEDIVKEAKETGYVETLFHRRRYLPDIHNRNFNLRSFAERTAINSPIQGTAADIIKVAMVRMDKALKEKGLQANMLLQVHDELIFECPEEEIPVLEKLVPEIMEHAVSLAVPLKVDSNFGDSWYEAK

SEQ ID NO: 517 - DNA, 1815 bp, synthetic construct
  misc_feature 1..1815: note = Variant of DNA polymerase
  source 1..1815: mol_type = other DNA
atgcaccatcatcatcatcatggcggtagcggcggtggcgcagccagccaacaggaagaggaactgcaggttatctactgtactgaggaagatctggatgaactgggtaaagctctgccgtccattcagaccgtgcacgtggaaactcatggcgataacccgcaccaagctgacgtactgggtattgcattcgcagctgaggaaaagtattactatgtcccgttcgaactcctgaaatccgaaggcgctggcaaaatcaccgaatggctgggcgattcttccgcaccgaagcagggccacgacctgcaccgtgcagacctggctctgcactggcagggtattgcgttcgccggtgcatctttcgatatctctctggcagcgtatctcctggacccgactggtggcgagcaggcactgtccgatctggcagctaagtacggtctgccgtctgtgccgtctgatgaatccatttacggtaaaggcgcgaaatacaaagtcccggaccaggaaaccctgggcctgcacctggcccgtaaagcagccgcagcgagccgtctcgaaccgaaacagcgtgaggaactggaaaaaaacggcatgagcggtctgtttttcgacctcgaaatgccgctgtcccgtatcctggctgacatggagaagcagggcgtttccgtaaaccgtaacgacctgcaggaactgggtaccgagttccaagcgcaaatcgacaaactggtcgcacgtatctacgaactggcgggtaccgagttcaatctgaactctccgaaacagctcggtgaaatcctgttcgacaaactgcagctgccggtcattaagaaaaccaaaaccggttatagcaccgacgcagacgttctcgacaaactggcgccataccacgagatcgtccaatttatcctggactaccgtcagctggctaaactgcagtccacctatgtggaaggcctcctgaaagagattcgccctgagactggtaaagttcacaccttctttcgccagaccattaccgccaccggtcgcctctccagccagtacccgaatctgcagaacatcccgattcgtctggaggaaggtcgcaaaatccgtaaagttttcgtgccgtctgaggaaggttggcacatgctggctgcggattattctcaaatcgaactgcgcgttctggcgcacatctctaacgatgagcgtctgaaggaggctttcctgcataacatggatatccacactaaaaccgcgtctgacgtcttcggcgtcgcaccggaggcggttgacagcaacatgcgtcgctctgcgaaagctgttaacttcggcatcgtttacggtatcagcgattatggtctgagccagaacctgaacattactcgcaaagaagctgcgaaattcatcgatcagtacttcgacgttttccagggcgtgcgtcgctacatggacgagatcgtacgcgaagctaagcgcgatggctatgtaaaaactctcctggagcgtcgccgttatctgccggagattaatgcttccaactttaacatccgctccttcgctgaacgtaccgcgatgaatactccaattcagggcaccgcagcggacatcattaaactggcaatggttcgtatggacgagagcctgcgtaaacacaacctgcgcagccgcatgctgctccaggtacacgatgaactggttttcgaagtgcctccggaggaactggaaatgatgaccaagctggttccggaaaccatggagaaagctatcgaactgagcgtgccgctgaaagcggaagtctccagcggcctgaactggtatgaagctaaa

SEQ ID NO: 518 - protein, 605 aa, synthetic construct
  REGION 1..605: note = Variant of DNA polymerase
MHHHHHHGGSGGGAASQQEEELQVIYCTEEDLDELGKALPSIQTVHVETHGDNPHQADVLGIAFAAEEKYYYVPFELLKSEGAGKITEWLGDSSAPKQGHDLHRADLALHWQGIAFAGASFDISLAAYLLDPTGGEQALSDLAAKYGLPSVPSDESIYGKGAKYKVPDQETLGLHLARKAAAASRLEPKQREELEKNGMSGLFFDLEMPLSRILADMEKQGVSVNRNDLQELGTEFQAQIDKLVARIYELAGTEFNLNSPKQLGEILFDKLQLPVIKKTKTGYSTDADVLDKLAPYHEIVQFILDYRQLAKLQSTYVEGLLKEIRPETGKVHTFFRQTITATGRLSSQYPNLQNIPIRLEEGRKIRKVFVPSEEGWHMLAADYSQIELRVLAHISNDERLKEAFLHNMDIHTKTASDVFGVAPEAVDSNMRRSAKAVNFGIVYGISDYGLSQNLNITRKEAAKFIDQYFDVFQGVRRYMDEIVREAKRDGYVKTLLERRRYLPEINASNFNIRSFAERTAMNTPIQGTAADIIKLAMVRMDESLRKHNLRSRMLLQVHDELVFEVPPEELEMMTKLVPETMEKAIELSVPLKAEVSSGLNWYEAK

SEQ ID NO: 519 - DNA, 1803 bp, synthetic construct
  misc_feature 1..1803: note = Variant of DNA polymerase
  source 1..1803: mol_type = other DNA
atgcaccatcatcatcatcatggcggtagcggcgacgaggaaaaagaagcgaagcgcactgaaatcaacttcgaagttgtcacggaagttacttccgaaatgttcaccgatgacatggcggtttacgttcagctcctgtctgataactaccacactgcagaggttgtgggcgtaagctggggtaacgaagaccatatttacgttggtgcagcggaagacatcctcacttccccactgttcaaagaatgggcagaaaacgagtctctgacgaaagcaactttcgatgcaaaacagacttatgttgctctgaaccgctacggtatcaaactggcggcagtgaaatacgacgtactcctggaggcttatctcctggacgtcaaagataacagcaacgacctggctgcaatcgccgaagagtacaactatcatgatgtggctaacgatgaaactgtctatggtaaaggcgctaaaattaaagtgccggaagacattactgagatgcatacccacctggcacgtaaggttaaagcgattgctgtcctgggtcctgacctcatggaacagctggagaataaccatcagaaagaactgttcgctgatatggaactgccgctggccaaaattctggcagatatggagatccaaggcattaccgttaacggtcatcgtctggaggaaatgcgcgaagagtttagcgctcgtctgaaagaaatcgaacagaaaatttacgccgaggccggtgaagagttcaacattaacagcccgaaacagctgggcgtaatcctgtttgagaaaatgggttacccggttatcaaaaagactaagacgggctattccactgccgtagacgtcctggaaaaactccaggatcaggcgccgatcgtggaatacatcctcgactatcgtcagatcgcgaaaatccaatctacctatgtggaaggcctcctgaaagtggttcgcgaggatacgggtcgtgttcacacccgctacatgcagactatcgcccgtactggccgtctgtctagcgtagacccgaacctgcagaacattccaatccgtctggaagagggtcgcaagatccgtcaggctttcgtgcctcgcgaagagggttggaaaatcttcgcttctgattattcccagatcgaactgcgtgtgctggctcacatttctaacgacgaacacatgaaagaagcattcatcgaggaacaggacatccacacctccactgcgatgcgtgtcttcggtgtcgaaaaaccggaagaggtcacctccaacatccgtcgccgtgccaaagcagtaaacttcggtatcgtctatggcatcagcgactacggcctgagccagaacctgggcatcacgcgtaaagaagcgcaacagttcatcgatacttacttcaagaaatacccgggcatcgaaacctatatgcacgaagtggtccgcgaggctaaagaaaaaggctttgtagaaaccctgtttaatcgtcgccgttacctgccggaaattaactctcgtaactttaacctgcgttctttcgcggaacgcactgctatcaataccccgatccagggtagcgcagcggatatcctgaaggtggctatgattaaaatcgcgcaggcactgaaagaatctgacctcaaagctactatgctcctgcaagttcacgacgagctgatcttcgaggctccggaggaagagatcccggcgctgcagaaactggtagaagacgttatggaacatgcggtggaactgaacgttcctctgaaagtagaatccgacttcggtcagtcctggtatgacgcgaaa

SEQ ID NO: 520 - protein, 601 aa, synthetic construct
  REGION 1..601: note = Variant of DNA polymerase
MHHHHHHGGSGDEEKEAKRTEINFEVVTEVTSEMFTDDMAVYVQLLSDNYHTAEVVGVSWGNEDHIYVGAAEDILTSPLFKEWAENESLTKATFDAKQTYVALNRYGIKLAAVKYDVLLEAYLLDVKDNSNDLAAIAEEYNYHDVANDETVYGKGAKIKVPEDITEMHTHLARKVKAIAVLGPDLMEQLENNHQKELFADMELPLAKILADMEIQGITVNGHRLEEMREEFSARLKEIEQKIYAEAGEEFNINSPKQLGVILFEKMGYPVIKKTKTGYSTAVDVLEKLQDQAPIVEYILDYRQIAKIQSTYVEGLLKVVREDTGRVHTRYMQTIARTGRLSSVDPNLQNIPIRLEEGRKIRQAFVPREEGWKIFASDYSQIELRVLAHISNDEHMKEAFIEEQDIHTSTAMRVFGVEKPEEVTSNIRRRAKAVNFGIVYGISDYGLSQNLGITRKEAQQFIDTYFKKYPGIETYMHEVVREAKEKGFVETLFNRRRYLPEINSRNFNLRSFAERTAINTPIQGSAADILKVAMIKIAQALKESDLKATMLLQVHDELIFEAPEEEIPALQKLVEDVMEHAVELNVPLKVESDFGQSWYDAK

SEQ ID NO: 521 - DNA, 1797 bp, synthetic construct
  misc_feature 1..1797: note = Variant of DNA polymerase
  source 1..1797: mol_type = other DNA
atgcaccatcatcatcatcatggcggtagcggctctgcggaagaggaagcagacttcgaggaaatcacctttgaaattgcgcaagaagttcacgatgacatgctcacttccgaggctgcgctgatcgtggaaggttatgaggaaaattaccatcacaaccagctgctcggtttcggcatctccaacaataacggccactatttcatcgacaaagacaccgcactgagctcctctaaatttaaagcgtggctggaggacggtcgtgtaaagaaaaccgttttcaacggtaaacgtaccattgttagcctgaaatgggcaggtcacgaaattaaaggtatcgaacacgacgtcatgattgcttcttacatcctgaatccggcggaggcaaacgatgacctggcgaccattgccaaactgaaaggctaccatcaggtgcagagcgatgaggcggtttacggcaaaggcgctaaacgttctattgcagaagcggaccagctggccgaacacgtcatccgcaaggcagcggccgttgcttacctgaaagaagtactggaaaaggaactggttgaaaacgaacagtttgagctgtttgaaaaactggaaatgccgctggcgatcgttctggctgatatggagtatcagggtgttaaaatcgaccgtgcacgtctggatgaaatgggtgaagacctgcgcgaacagctggaaaaaatcgaagcaaaaatttacgagtatgcgggtcaggagttcaacattaacagcccgaaacagctgggtgtagttctgttcgaaaagatgcaactgcctgtgatcaagaaaaccaaaaccggttactctaccagcgcagatgtcctggaacagctggctagcactcacgacattatcccggaaattctgcagtatcgtcagctgggtaaactgcagagcacgtacattgagggcctgaaaaaggttattcacgagtccgatggcaaagtgcacactcgtttcaaccagaccctcacccagaccggtcgtctgagctctgttgatccgaacctgcagaacattccgatccgcctggaggaaggtaagaaaatccgtggcgcattcgttccgagccagccgggctggctgattttcgcagcggactactctcagatcgaactgcgtgttctggcgcacatcgcggacgatgaaaaactgatcgatgcgtttaaacacgatctggacatccacaccaaaactgctatggacgtttttcacgtagagcgcgaagaggttactgcaaacatgcgccgtcaggccaaagcagttaacttcggcatcgtatacggtatttctgattatggtctgtctcagagcctgggcatcacccgtaaagcggctgccaccttcatcgaacgttacctgaagagcttcccgggtgttcaggagtatatggacactattgttcgcgatgcgaaggagaaaggttacgtcaccactctcctgcatcgtcgccgttacctgccggaaatcacctcccgtaacttcaacctgcgcagcttcgcggaacgtaccgcgatgaacaccccgatccagggcaccgcggctgacattatcaagaaagcaatgatcgaaatggacaaacgcctgaaagatgagaacctgcaggcaaaactgctcctgcaggtacacgatgaactgattttcgaagcgccggaggaagagatcaaaattctggagaaaattgtcccggaagtgatggaaaatgcactggaactggaagttccgctgaaggtcgattactcttacggcaagacttggtacgaggcgaag

SEQ ID NO: 522 - protein, 599 aa, synthetic construct
  REGION 1..599: note = Variant of DNA polymerase
MHHHHHHGGSGSAEEEADFEEITFEIAQEVHDDMLTSEAALIVEGYEENYHHNQLLGFGISNNNGHYFIDKDTALSSSKFKAWLEDGRVKKTVFNGKRTIVSLKWAGHEIKGIEHDVMIASYILNPAEANDDLATIAKLKGYHQVQSDEAVYGKGAKRSIAEADQLAEHVIRKAAAVAYLKEVLEKELVENEQFELFEKLEMPLAIVLADMEYQGVKIDRARLDEMGEDLREQLEKIEAKIYEYAGQEFNINSPKQLGVVLFEKMQLPVIKKTKTGYSTSADVLEQLASTHDIIPEILQYRQLGKLQSTYIEGLKKVIHESDGKVHTRFNQTLTQTGRLSSVDPNLQNIPIRLEEGKKIRGAFVPSQPGWLIFAADYSQIELRVLAHIADDEKLIDAFKHDLDIHTKTAMDVFHVEREEVTANMRRQAKAVNFGIVYGISDYGLSQSLGITRKAAATFIERYLKSFPGVQEYMDTIVRDAKEKGYVTTLLHRRRYLPEITSRNFNLRSFAERTAMNTPIQGTAADIIKKAMIEMDKRLKDENLQAKLLLQVHDELIFEAPEEEIKILEKIVPEVMENALELEVPLKVDYSYGKTWYEAK

SEQ ID NO: 523 - DNA, 1797 bp, synthetic construct
  misc_feature 1..1797: note = Variant of DNA polymerase
  source 1..1797: mol_type = other DNA
atgcaccatcatcatcatcatggcggtagcggcgaggaagaggcggagcagccgctggttgacgttgacgttgaagtcgtgcacaccatcactgaagatatgctgtactctccgtctgctatcgtcgtagaagtactggaggaaaattatcataacgcagaaatcgtgggcatctctatcgtgaatgaagttggctcctattacatcccgactgaggttgcaattaacagcgacatgtttaagaaatgggctaacgacgagaaaaacgagaagtggatctttaacgcaaaacaggctatcgtctctctgggttggaacgacatctctctgcgcggtgtgacgttcgacattcaaattgcttcctatctgatcgacccgtccgcgagctctcacgagatggcagacatttccaaccgtaaacgcagctacaccgtgaaatctgacgaagcggtttacggtaaaggcaagaaacgtcaggtaccggaggaagagattgttgctcagcacctggttcgtaaagctgcagctatcaacgtgctgaaagaggaactggagtccgaactgaaggagaatgaacagttcgaactgtttaaagatctggaaatgccgctgtctattgtactgggccacatggagatgaatggtatcagcatcaacaaagaggaactgctccagatgggtgaaaccctgtctgacaaactgtctaccatggaaaaagaaattcatgaactggcaggcgtagagttcaacattaacagcccaaaacagctgggcgaaattctgtttgacaaactgcaactgccggttgtaaagaaaaccaaaactggttacagcacttccgcggatgtactggagcagctgcgtgacaaacacgaaatcgttgagaaaatcctcctgtaccgtcagctgggtaagctcaattccacctatatcgaaggcctcctgaaagtgatccaccagaaatctggcaaaatccatactatttttaaccaggcgctgacccagacgggccgcctgtcctctaccgagccaaacctccaaaacatcccaattcgcctggaagagggccgtaagattcgtcgcgcttttgttccggaacgtgaaaatgctgttatcttcgccgcagattacagccagattgaactgcgtgttctggcccatatctccaacgacgaaaacctgacgaacgccttcaaagaaaacatggatgttcacaccaaaactgcgatggatgtgttccacgtttctgcagacgaagttaccagcctgatgcgtcgcaccgctaaagcggttaacttcggtatcgtatacggcatctctgactatggcctgtcccagaatctgggcattacccgtaaggaagcgaagaaatttatcgaccgttactttgactcctacccaggcgtgaaagagtacatggaaagcatcgttgaggaagcgcgtgtgaacggctacgtgaccactatgctgcaccgtcgccgttatctgccggagattacctctcgcaactttaacctccgctccttcgccgaacgcaccgcgatgaacaccccgattcagggctccgccgctgatattatcaagaaagcgatggtcaaaatggaagaggaaatgaaagaaaaaggcctgaaatccaccctgctcctgcaggttcatgatgaactgatcttcgaagttgtacaagaagagatcgaaaccatgaaagaactggtaccgaaagtcatggagaacgcggtgaacctggcagtgcctctgaaagttgacttctccttcggcgatacctggtacgacgctaag

SEQ ID NO: 524 - protein, 599 aa, synthetic construct
  REGION 1..599: note = Variant of DNA polymerase
MHHHHHHGGSGEEEAEQPLVDVDVEVVHTITEDMLYSPSAIVVEVLEENYHNAEIVGISIVNEVGSYYIPTEVAINSDMFKKWANDEKNEKWIFNAKQAIVSLGWNDISLRGVTFDIQIASYLIDPSASSHEMADISNRKRSYTVKSDEAVYGKGKKRQVPEEEIVAQHLVRKAAAINVLKEELESELKENEQFELFKDLEMPLSIVLGHMEMNGISINKEELLQMGETLSDKLSTMEKEIHELAGVEFNINSPKQLGEILFDKLQLPVVKKTKTGYSTSADVLEQLRDKHEIVEKILLYRQLGKLNSTYIEGLLKVIHQKSGKIHTIFNQALTQTGRLSSTEPNLQNIPIRLEEGRKIRRAFVPERENAVIFAADYSQIELRVLAHISNDENLTNAFKENMDVHTKTAMDVFHVSADEVTSLMRRTAKAVNFGIVYGISDYGLSQNLGITRKEAKKFIDRYFDSYPGVKEYMESIVEEARVNGYVTTMLHRRRYLPEITSRNFNLRSFAERTAMNTPIQGSAADIIKKAMVKMEEEMKEKGLKSTLLLQVHDELIFEVVQEEIETMKELVPKVMENAVNLAVPLKVDFSFGDTWYDAK

SEQ ID NO: 525 - DNA, 1815 bp, synthetic construct
  misc_feature 1..1815: note = Variant of DNA polymerase
  source 1..1815: mol_type = other DNA
atgcaccatcatcatcatcatggcggtagcggcaaatctggcggtctgaaggaagttgaacagacccagttccaggaactgaccaaagcaaacctggacaaagcaatggaatccctgggcaacgaggtgtccctgtacctggagatgccggagaaaaactatcacctgtcctcttttgctggtttcgttatcggtaacgatgaaaaatggttcgtttctcgcaacgtggagctcctgaaactgccgactatcaaagacctgatcgaaaatatcgacgttaaactgaacgttttcgatagcaaacgtacttacgtgggcctgaaccgtctggagattaacgcgcagtgtttcaactatgacgtcctcctgcagtcctacctgctcgatactaacgaaaactctaacgacctgggtctcctggctcaacagcacgcgtactataacgtggaatctgatgctgacgtttacggtaccggcgctaaactgagcatcccggacgatgaccagacctttttccagcacctggctaacaaaggcaaggcgatcgaagtgctgggtaaggccctggatggtgaactgaaacagaacgaacaagacaaactgtactgggaaattgaactgcctctggcgatcgttctggcaaaaatggagatcagcggcatccgtgtcgactctaaccgtctgattcagatgcagtctgagttcgcggaacgtctgagcgaaattgaaggtgaaatctatcgtctggcgggtgaagagttcaacatcaattccccgaaacagctgggccgtatcctgttcgaaaaaatgcgtctgccgatcattaagaaaaccaaaaccggttattccactgctgtggacgttctcgaaaaactgcgtggtgaatctgacatcgtagatgacattctgaattaccgtaccattagcaaaatccagtccacctatgtagagggtctcctgaaagtggtccactctaaagatcagaaaatccatacgacttacatccagaccctgacccagaccggtcgtctgagctccatcgaaccgaacctgcagaacatcccggtccgtatcgacgaaggtaaaaagatccgtcaggcgttcgtaccgtctaaagaaggctggcacatcctgagctctgactacagccagatcgaactccgcgtgctggcacacctgaccggtgacaagaacatgcaggaggctttcattgaaaaccaggatatccacgctagcaccgcggttcgcatctttggtctgaaagatgcaagcgaagtcaccccgaatatccgtcgccaggcgaaagcggtgaacttcggtattgtttatggtatctctgattatggcctgtcccagaacatcggcatctcccgttctgacgctaagaaatttatcgaaacttattttcaagagttcccgggcgttaaaaactacgtagacaacatcgtcaaggtggcaaaagaacaaggttacgtggaaactatcagccaccgtcgccgttatctcccggacatcaactctagcaacttctcccagcgttccttcgcagaacgcacggcgatgaacacgcctatccaaggcagcgcggctgatattatcaaaattgccatgatcaaaatgcaacaggaactggagtcccgtaatctgaaaactaaaatgctcctgcaagtgcacgacgagctgatcttcgaagtgccggacgaggaaatgaacgagattaagaaactggttccgtccgttatggactccgctatgaagctgaaagttccgctgaaggttgaaacctcttggggtaataactggtatgaagcaaaa

SEQ ID NO: 526 - protein, 605 aa, synthetic construct
  REGION 1..605: note = Variant of DNA polymerase
MHHHHHHGGSGKSGGLKEVEQTQFQELTKANLDKAMESLGNEVSLYLEMPEKNYHLSSFAGFVIGNDEKWFVSRNVELLKLPTIKDLIENIDVKLNVFDSKRTYVGLNRLEINAQCFNYDVLLQSYLLDTNENSNDLGLLAQQHAYYNVESDADVYGTGAKLSIPDDDQTFFQHLANKGKAIEVLGKALDGELKQNEQDKLYWEIELPLAIVLAKMEISGIRVDSNRLIQMQSEFAERLSEIEGEIYRLAGEEFNINSPKQLGRILFEKMRLPIIKKTKTGYSTAVDVLEKLRGESDIVDDILNYRTISKIQSTYVEGLLKVVHSKDQKIHTTYIQTLTQTGRLSSIEPNLQNIPVRIDEGKKIRQAFVPSKEGWHILSSDYSQIELRVLAHLTGDKNMQEAFIENQDIHASTAVRIFGLKDASEVTPNIRRQAKAVNFGIVYGISDYGLSQNIGISRSDAKKFIETYFQEFPGVKNYVDNIVKVAKEQGYVETISHRRRYLPDINSSNFSQRSFAERTAMNTPIQGSAADIIKIAMIKMQQELESRNLKTKMLLQVHDELIFEVPDEEMNEIKKLVPSVMDSAMKLKVPLKVETSWGNNWYEAK

SEQ ID NO: 527 - DNA, 1800 bp, synthetic construct
  misc_feature 1..1800: note = Variant of DNA polymerase
  source 1..1800: mol_type = other DNA
atgcaccatcatcatcatcatggcggtagcggcttcgaagctgttgaaaccgagcaagctgaactggtgtttgaaaacgtccaggcaatcacgggtgatatgctcaaagaaacgatggctatccacctggagctggaaaacgaacattaccactcttgcaacgctctgggtctggctctgagcgacggcgagcgcactgtctacaccgcgatcgacaacgtggttgacaacgctgatctgaaggcttggctgcaggatgaaactaaaaagaaatacatcgttgactctaaagcgacgcaggcgatgctgcaccgcctgggcatcgaactgaaaggcgttgagttcgatctgctcctggcttcctacatcctgaaaccgtccatctctggtgacgatgtagcaactctggcgaaggagttcggctaccaagacgttcagtccaacgaagcaatctacggcaagggtgcaaagtgggtggttccgggtgcggaccatgttgccgagcatgtgtctcgtaaagcagtagcggtgtggaaactgcagccgctcctggaacagaaactcaaagaaaacgaacaattcgaactgtacaaagaactggagctcccgctggctcacatcctgggtaaaatggaaagcgaaggcatcaccgtgaatattgacaccctgcgccagatgggcgatgacctgaaagcgaaactgaaagtaatggaagccactatctacgaactggcaggcgaaaaattcaacatcaacagcccgaaacagctgggtgtgatcctgtttgataaactgggtctgccggtgattaagaaaactaaaactggctactctactgcagcggatgttctggagaaactgcagtctgaacacgatatcgtcaaacatatcctggaatatcgcaccctcgcaaaactgcaatctacctacatcgagggcctgatcaaagaagtgcacaaagaagacagcaaagttcacacccgcttccaacaggcgctgacctctacgggccgtctgtccagcaccaacccgaacctgcaaaacattccgatccgcctggaggaaggtcgtaaaattcgtaaagcgtttgtcccgagcaagaaagactggattctgttcgctgcagactatagccagatcgaactgcgtgttctggctcacatgtgtggcgatgacgcgctggttgaagcgttccaacagggcatggacattcacacccgcaccgctatggacgttttcaacctggaaaacccggatgaagtgacctctctgatgcgtcgcaccgctaaagccgtgaactttggcatcgtttacggcatcagcgattatggtctctctcaatctctcgacatcacgcgcaaagaagccgcgatcttcatcgaaaattatctgcagagcttcccgggtgttaaaaactacatggacacctctatcgaggaagctaaaaaggctggtttcgtaactaccatcctgaatcgtcgccgttacctgccggatatcacttctagcaactttaacctgcgtagcttcgcggaacgcaccgctatgaacacccctatccagggctccgcagctgacattatcaaaaaggctatgatcgacatgaacgcccgtctggaacaggaaggtctgcagaccaaactgctcctgcaggttcacgacgaactgatttttgaggcgcctaaagaggaaatcgaaatcctggaacgtattgtgccagaagttatggaaaatgcgatcaaactgtctgtcccgctgaaggtagagttctcctatggtgcgacctggtacgacgccaaa

SEQ ID NO: 528 - protein, 600 aa, synthetic construct
  REGION 1..600: note = Variant of DNA polymerase
MHHHHHHGGSGFEAVETEQAELVFENVQAITGDMLKETMAIHLELENEHYHSCNALGLALSDGERTVYTAIDNVVDNADLKAWLQDETKKKYIVDSKATQAMLHRLGIELKGVEFDLLLASYILKPSISGDDVATLAKEFGYQDVQSNEAIYGKGAKWVVPGADHVAEHVSRKAVAVWKLQPLLEQKLKENEQFELYKELELPLAHILGKMESEGITVNIDTLRQMGDDLKAKLKVMEATIYELAGEKFNINSPKQLGVILFDKLGLPVIKKTKTGYSTAADVLEKLQSEHDIVKHILEYRTLAKLQSTYIEGLIKEVHKEDSKVHTRFQQALTSTGRLSSTNPNLQNIPIRLEEGRKIRKAFVPSKKDWILFAADYSQIELRVLAHMCGDDALVEAFQQGMDIHTRTAMDVFNLENPDEVTSLMRRTAKAVNFGIVYGISDYGLSQSLDITRKEAAIFIENYLQSFPGVKNYMDTSIEEAKKAGFVTTILNRRRYLPDITSSNFNLRSFAERTAMNTPIQGSAADIIKKAMIDMNARLEQEGLQTKLLLQVHDELIFEAPKEEIEILERIVPEVMENAIKLSVPLKVEFSYGATWYDAK

SEQ ID NO: 529 - DNA, 1800 bp, synthetic construct
  misc_feature 1..1800: note = Variant of DNA polymerase
  source 1..1800: mol_type = other DNA
atgcaccatcatcatcatcatggcggtagcggcgagtctgaagctaaaactgaactgccggacattgaggttgaagtgatcgaggaactgaaggaagagatgttcacgggccgcgaagctctcgtggttgagatgctgtacgaaaactaccacaccgctccgatcgaagcaatcgccatcgttaacgaggaaaaaaagtacgtactgaccctggaacaggctgtgaagtcccctgtctttaaaaagtgggcggaagacgatacgcgtgagaagtgggtttttgacgcaaaacgtaccctggttgcaatgctgcgttacggtatcgaactgaagggtatcaccttcgacctgctcctggcaagctacctcatcaacccgtccgaaaataaccacgacatcccggcagttgcccaccgcctgggtgaagctgaagtgaactatgatgaggaagtttacggcaaaggcgctaaactgaaacgcccagatgaagatcgcactttttacgaacacatcagccgcaaagcgagcgcactgtaccacatgaagagcaaaatggaggaacagctggttcagaacgagcagttcaacctgtacaatgatctggaaatgccgctggcgctgatcctcggtcgcatggaacaccgtggtgtgcgtgttgacgttggccgtctggaagagatgggcgaagagctggaagctcgcctgaataaagtggaagaggaaatttatgaactggctggtgaaccattcaacctgaactcccctaaacaactgggtccaatcctgttcgaaaaactggaactgccggtgattaagaaaaccaaaaccggctatagcacttctgccgatgttctggaacagctggaagataaacatccgattatcacgaaaatcctcctgaaccgtcagctgcgtaaactgaagtctacttatatcgaaggtctcctgaaagtggttcacaaagacactcataaaattcacactcgtttcaaccaggcgctgacccagaccggccgtctgtctagcaccgatccgaacctgcagaacatcccgattcgcctggaggaaggccgcaaaatccgtcaagcctttattccgagcgaggaaggctgggttatgttcgcgtctgattattcccagattgagctgcgtgttctggcgcacatcgctcaggatgaaaagctgatcgaggcattccgtggcggtgaggatatccacacccagaccgcgtctgaagtttttggcgtagcgccggaggaagtaacctctaacatgcgtcgccaggcaaaggctgttaatttcggtatcgtatacggcatctccgattacggcctgtctcagtctctgggtatcacccgcaaagacgcacaggcatttatcgacaagtacttcgaatcctacccgggtgttaagtcctatatggatgaatctgtacgtgaagctaaggataccggttatgtaaaaactttcatgaaccgccgtcgctacctgccggatatcaagagccgtaacttcaacaaacgcggcttcgctgaacgtaccgcgatgaacaccccgatccagggctccgcagctgacattatcaagaaagcaatggtggatctggagaaacgcctggttgaggaaaaactggaagcaaaagttctcctgcaggtgcacgacgaactgatcattgaagctccgaaagaagagatcgaaaaactgcaggacctggttgcgagcgtaatggaatctaccgtcgaactggatgttccactgaaggtagattctagctacggtgatacctggtacgatgccaaa

SEQ ID NO: 530 - protein, 600 aa, synthetic construct
  REGION 1..600: note = Variant of DNA polymerase
MHHHHHHGGSGESEAKTELPDIEVEVIEELKEEMFTGREALVVEMLYENYHTAPIEAIAIVNEEKKYVLTLEQAVKSPVFKKWAEDDTREKWVFDAKRTLVAMLRYGIELKGITFDLLLASYLINPSENNHDIPAVAHRLGEAEVNYDEEVYGKGAKLKRPDEDRTFYEHISRKASALYHMKSKMEEQLVQNEQFNLYNDLEMPLALILGRMEHRGVRVDVGRLEEMGEELEARLNKVEEEIYELAGEPFNLNSPKQLGPILFEKLELPVIKKTKTGYSTSADVLEQLEDKHPIITKILLNRQLRKLKSTYIEGLLKVVHKDTHKIHTRFNQALTQTGRLSSTDPNLQNIPIRLEEGRKIRQAFIPSEEGWVMFASDYSQIELRVLAHIAQDEKLIEAFRGGEDIHTQTASEVFGVAPEEVTSNMRRQAKAVNFGIVYGISDYGLSQSLGITRKDAQAFIDKYFESYPGVKSYMDESVREAKDTGYVKTFMNRRRYLPDIKSRNFNKRGFAERTAMNTPIQGSAADIIKKAMVDLEKRLVEEKLEAKVLLQVHDELIIEAPKEEIEKLQDLVASVMESTVELDVPLKVDSSYGDTWYDAK

SEQ ID NO: 531 - DNA, 1806 bp, synthetic construct
  misc_feature 1..1806: note = Variant of DNA polymerase
  source 1..1806: mol_type = other DNA
atgcaccatcatcatcatcatggcggtagcggcgctccgaccgctaccccgggtctggaggaagtaacttacaccgtgctcaccgctgacaacgtgaccgagctcccgtcctttactgacggttgtgagttctacctggaaatgctggacgataactaccacaccgcggaactggcgggttttgtaatcggccacaacgaccaatggtgggtctctcgtgacaccgctctcctgcagcaagcgccgctgaagggtctcctggagaatgcggacatcgcgaagcaagtgttcgatgctaaacgtaccttcgttgcgctgcaacgtctggcagtcaccctgaccggcgttgattgcgacctgctcctgggttcctatctcctgaacacctatgataactccaatgacctgggccgtctggcaatggaacacggctatcaccaggttgcaacggatgaagatgtatacggcaagggtgcaaaagcggctatcccggatgacgatgacgtttttttcagccacctggcgcgtaaagcccgtgccattgaacagctgcgtccgcagatcttcaaagacctggctgataacgaacaaacggacctgtaccgcgacattgagctgccgatggcgttcgtgctggctcgtatggaggtagcgggcattaccgtggaagctagcgaactggaggctatgggtagcaaattcactgaacaactggccgaaatcgagcaaaccatctataacgaagccggtgaggaatttaacatcggttctcctaaacagctgggtcacatcctcttcgaaaaaatgggtctgccggttattaagaaaaccaaaactggttattccaccgcagttggtgtcctggaaaagctggccgcagaagccccgattgctgagaacatcctgaaataccgcaaaatcgcaaagattcagtctacgtacgtagagggcctgctcaaagtaattcacccagacgatcagaaagtgcacactcgttatctgcaaaccctgactcagaccggccgcctgtcctctgtagacccgaacctgcagaacatcccggtacgtaacgaggaaggccgtgctatccgtaaggccttcgttccgagccacccggattgggagatcttcagctccgactactcccagatcgaactgcgtgtactggctcacatgagccacgacaaacagatgcaggaggcgtttcgcgaaggccaggatatccacgctgcgaccgcacgccgtattttcaaaatgggcccggatgaggaagtcaccccgaacatccgtcgccaggcgaaagcagtcaacttcggcatcgtgtacggtatttctgactttggcctgtctcaaaacatcggtatcagccgtaagcaggctaaggcgtttattgatacttacttcgaggaatatcctggtgttaaggcttacaccgaacgcatggtgcagcaagcgcacgaactgggctacgttgaaaccatcgcgcaccgtcgccgttacctgccggatattaacagccgtaacttcaaccagcgtagctttgcggaacgcactgccatgaacaccccgatccagggttccgccgcagacattatcaaaatcgcaatgatccgtatggaacaggctctgaaagacatgcaggcgaccatgctcctgcaggtacatgacgaactgatctttgaggccccggcgagcgaaatcgataccctggcaaaactggttccgtctgtaatggactccgctatcgaactggagatcccgctgaaagtggagtctcactatggcccgacctggtacgacgcgaaa

SEQ ID NO: 532 - protein, 602 aa, synthetic construct
  REGION 1..602: note = Variant of DNA polymerase
MHHHHHHGGSGAPTATPGLEEVTYTVLTADNVTELPSFTDGCEFYLEMLDDNYHTAELAGFVIGHNDQWWVSRDTALLQQAPLKGLLENADIAKQVFDAKRTFVALQRLAVTLTGVDCDLLLGSYLLNTYDNSNDLGRLAMEHGYHQVATDEDVYGKGAKAAIPDDDDVFFSHLARKARAIEQLRPQIFKDLADNEQTDLYRDIELPMAFVLARMEVAGITVEASELEAMGSKFTEQLAEIEQTIYNEAGEEFNIGSPKQLGHILFEKMGLPVIKKTKTGYSTAVGVLEKLAAEAPIAENILKYRKIAKIQSTYVEGLLKVIHPDDQKVHTRYLQTLTQTGRLSSVDPNLQNIPVRNEEGRAIRKAFVPSHPDWEIFSSDYSQIELRVLAHMSHDKQMQEAFREGQDIHAATARRIFKMGPDEEVTPNIRRQAKAVNFGIVYGISDFGLSQNIGISRKQAKAFIDTYFEEYPGVKAYTERMVQQAHELGYVETIAHRRRYLPDINSRNFNQRSFAERTAMNTPIQGSAADIIKIAMIRMEQALKDMQATMLLQVHDELIFEAPASEIDTLAKLVPSVMDSAIELEIPLKVESHYGPTWYDAK

SEQ ID NO: 533 - DNA, 18 bp, synthetic construct
  misc_feature 1..18: note = Orf1a-F3
  source 1..18: mol_type = other DNA
cggtggacaaattgtcac

SEQ ID NO: 534 - DNA, 22 bp, synthetic construct
  misc_feature 1..22: note = Orf1a-B3
  source 1..22: mol_type = other DNA
cttctctggatttaacacactt

SEQ ID NO: 535 - DNA, 28 bp, synthetic construct
  misc_feature 1..28: note = Orf1a-LF
  source 1..28: mol_type = other DNA
ttacaagcttaaagaatgtctgaacact

SEQ ID NO: 536 - DNA, 27 bp, synthetic construct
  misc_feature 1..27: note = Orf1a-LB
  source 1..27: mol_type = other DNA
ttgaatttaggtgaaacatttgtcacg

SEQ ID NO: 537 - DNA, 47 bp, synthetic construct
  misc_feature 1..47: note = Orf1a-FIP
  source 1..47: mol_type = other DNA
tcagcacacaaagccaaaaatttatctgtgcaaaggaaattaaggag

SEQ ID NO: 538 - DNA, 45 bp, synthetic construct
  misc_feature 1..45: note = Orf1a-BIP
  source 1..45: mol_type = other DNA
tattggtggagctaaacttaaagccctgtacaatccctttgagtg

SEQ ID NO: 539 - DNA, 2628 bp, Parageobacillus genomosp 1
  misc_feature 1..2628: note = Variant of DNA polymerase
  source 1..2628: mol_type = genomic DNA
ttgaaaaagaaactggtgttgattgatggaaacagcgttgcttatcgcgctttttttgcgctcccgcttttacataacgataaagggattcatacgaatgccgtatatggctttacgatgatgctgatgagaattttagaagaagaaaaaccgacgcatatgcttgttgcttttgatgccgggaaaacgacgttccgccacaaaacgtttaccgaatataaaggcgggcggcagcaaacgcctccggaattatcggagcaatttccgctgctcagagagctccttcaggcataccaaatccgcttctatgagttggagaattatgaagcggacgatattattggtacgctgtcagcaaaggccgaaaaagagggatttgaggtcaaagtgatctctggcgaccgcgatttgacgcagcttgcttccgatcacgtgacggtagacattacgaaaaaaggcattaccgatgtcgaatcatatacgccggaaacggtgcaggagaaatatggactgatgccggaacaaattatcgatttaaaaggattgatgggggacaaatccgataatattccgggagtgcccggcattggcgagaaaacagcggtaaagctgttaaaacagtttggaacggtagaaaacatattggcttccatcgagcaaatcaatggcaacaaactaaaggagaatttagagaaataccgcgatttggcgctgatgagcaagcagctggcgaccattttccgcgacgcgccggtcgagctttcattggaagatatcgaatatcgcggacaagatgtcgataaagttgtcgctttattcaaagagcttgggtttaactcgcttcttgacaaagtagctccgcaaacgaaaaaagaagaggctgtactgccaaacatcaattatacgatcgttgaagaagtgagcgagccgatactcgccgatcggtcggcgctcgttgtcgaggttttggaatccaattaccataaagcaccgattttagggtttgccctagcgaatgagcacggcaatttctttatccgcaccgataccgccctgtcgtcgccgttgtttaccgcctggctcgaggatgagtcaaagaaaaaaagcgtttttgacgggaagagggccatcgttgcgctaaaatggaaaggcattgagctgcgtggaattgaatttgatttattaatcgcctcgtacttattgaatccatcgcaatcgacggaagatgtcgcttcggtggcaaaaacgaagcaatatatggctgtgcaatccgatgaagcggtatacggcaaaggcgctaaacaaacggtgccggacgaaaacgtgctggccgagcatcttgtgcgcaaagcggcggcaatccgcgctttagaaaaagagttgatacacgatttgcaagaaaatgaacaatacgctttatttaccgatttggaattgccgctttcttcgattctcgctgagatggaatttaccggcgtaaaagtcgatgtcgagcgcttaaaagagatgggcgaagaattgaccgagcagcttcgggccgtggagcaggaaatttacaaactggcagggcaagagtttaacattaactcgccaaaacaattgggggttattttatttgaaaagctgcagctgcctgtattgaaaaaaacgaaaacaggatattcgacatcggcggatgtattagagaaactggcgccacagcatgaaattgtcgagaaaattttgcattaccgccagttaggaaaactgcagtccacctatattgaaggattgctaaaagtggtgcatcgtgacacccacaaagtgcacaccatttttaatcaggcgctgacgcaaacagggcggttaagttccacggagccgaacttgcaaaacattccgatccgtttagaggaagggcggaaaattcgccaggcgttcgttccgtccaagccggactgggtcattttttccgccgattattcgcaaattgagctgcgcgtgcttgcccatattgccaatgatgaaaatttaatcgatgcgttccgccatgatttagatattcatacgaaaacggcgatggacattttccacgtcacagccgatgaagtgacgccaaacatgcgcaggcaggcgaaagcggtaaactttggcatcgtttacggtatcagcgactacgggctgtcgcaaaatttaaacattccaagaaaagaggcagcggaatttatccgccggtattttgaaatttttccgggcgtaaagcagtatatggaaaacatcgtccaagaagcgaaacagaaaggatatgtcacgacgctattgcaccgccgccgctatttgccggacattacgagccgcaatttcaacctgcgcagctttgccgaacggacggcgatgaatacgccgattcaaggaagcgccgccgatattattaaaaaggcgatgattgatttggcggaccggctaaagcgggaaaagctgcaagcgcggatgctgctgcaagtgcatgacgaattgattttggaagcgccgagagaagaagtagaacggctgcagcaaatcgttcctgaagtgatggaaaatgcgatacaattaacagtgccgcttaaagtcgattatcattatggaccaacatggtatgacgcaaag

SEQ ID NO: 540 - protein, 876 aa, Parageobacillus genomosp 1
  REGION 1..876: note = Variant of DNA polymerase
MKKKLVLIDGNSVAYRAFFALPLLHNDKGIHTNAVYGFTMMLMRILEEEKPTHMLVAFDAGKTTFRHKTFTEYKGGRQQTPPELSEQFPLLRELLQAYQIRFYELENYEADDIIGTLSAKAEKEGFEVKVISGDRDLTQLASDHVTVDITKKGITDVESYTPETVQEKYGLMPEQIIDLKGLMGDKSDNIPGVPGIGEKTAVKLLKQFGTVENILASIEQINGNKLKENLEKYRDLALMSKQLATIFRDAPVELSLEDIEYRGQDVDKVVALFKELGFNSLLDKVAPQTKKEEAVLPNINYTIVEEVSEPILADRSALVVEVLESNYHKAPILGFALANEHGNFFIRTDTALSSPLFTAWLEDESKKKSVFDGKRAIVALKWKGIELRGIEFDLLIASYLLNPSQSTEDVASVAKTKQYMAVQSDEAVYGKGAKQTVPDENVLAEHLVRKAAAIRALEKELIHDLQENEQYALFTDLELPLSSILAEMEFTGVKVDVERLKEMGEELTEQLRAVEQEIYKLAGQEFNINSPKQLGVILFEKLQLPVLKKTKTGYSTSADVLEKLAPQHEIVEKILHYRQLGKLQSTYIEGLLKVVHRDTHKVHTIFNQALTQTGRLSSTEPNLQNIPIRLEEGRKIRQAFVPSKPDWVIFSADYSQIELRVLAHIANDENLIDAFRHDLDIHTKTAMDIFHVTADEVTPNMRRQAKAVNFGIVYGISDYGLSQNLNIPRKEAAEFIRRYFEIFPGVKQYMENIVQEAKQKGYVTTLLHRRRYLPDITSRNFNLRSFAERTAMNTPIQGSAADIIKKAMIDLADRLKREKLQARMLLQVHDELILEAPREEVERLQQIVPEVMENAIQLTVPLKVDYHYGPTWYDAK